(19) United States
(12) Patent Application Publication
(10) Pub. No.: US 2023/0149535 A1
(43) Pub. Date: May 18, 2023

(54) VACCINES FOR CORONAVIRUS AND METHODS OF USING THE SAME

(71) Applicant: THE WISTAR INSTITUTE OF ANATOMY & BIOLOGY, Philadelphia, PA (US)

(72) Inventors: Daniel W. KULP, Moorestown, NJ (US); David B. WEINER, Merion, PA (US); Yuanhan WU, Philadelphia, PA (US)

(21) Appl. No.: 17/918,321

(22) PCT Filed: Apr. 12, 2021
(86) PCT No.: PCT/US21/26864

§ 371 Date: Oct. 11, 2022

Related U.S. Application Data
(60) Provisional application No. 63/008,733, filed on Apr. 11, 2020.

(51) Int. Cl. A61K 39/215; C07K 14/005; A61P 37/04; C07K 14/195

(52) U.S. Cl. CPC A61K 39/215; C07K 14/005; A61P 37/04; C07K 14/195; C12N 2770/20022; C12N 2770/20034; A61K 2039/53

(57) ABSTRACT

Disclosed are compositions comprising an expressible nucleic acid sequence comprising a first nucleic acid sequence comprising a sequence that encodes a self-assembling polypeptide or a pharmaceutically acceptable salt thereof and a second nucleic acid sequence comprising a sequence that encodes an antigen from a virus from the family of Coronaviridae. In some embodiments, the expressible nucleic acid sequence further comprises a nucleic acid sequence encoding at least one viral antigen or a pharmaceutically acceptable salt thereof. In some embodiments, the expressible nucleic acid sequence further comprises at least one nucleic acid sequence encoding a linker.

### CROSS-REFERENCE TO RELATED APPLICATIONS

[0001] This application claims priority to U.S. Provisional Application No. 63/008,733 filed Apr. 11, 2020, the entire content of which is hereby incorporated by reference in its entirety into the present application.

### SUBMISSION OF SEQUENCE LISTING

[0002] The Sequence Listing associated with this application is filed in electronic format as a text file and hereby incorporated by reference into the specification in its entirety. The name of the text file containing the Sequence Listing is 37925_0008_SL_ST25 and the size of the text file is 675 KB.

### BACKGROUND

[0003] Vaccination is an extremely important public health measure that has demonstrated prophylactic and therapeutic utility against many infectious diseases^{[1-3]}, and impacted some forms of cancer^{[4]}. In the past decade, advances in material engineering has allowed for the development and study of a new generation of vaccines, such as nanoparticle vaccines^{[5-7]}. Hepatitis B and human papillomavirus (HPV) vaccines are examples of such self-assembling virus-like particles which have impacted millions of people^{[8, 9]}. Nanoparticles may come in several shapes and forms. Inorganic materials^{[10, 11]}, nontoxic phospholipids^{[12]}, virus-like particles (VLPs) or self-assembling protein nanoparticles (SAPN)^{[13-16]} can all scaffold and present antigens in repetitive multimeric manners to robustly stimulate immunity in animal models^{[16-18]}. An exemplary disclosure on compositions comprising such self-assembling vaccines and methods of preparing and using the same was provided in PCT application No. PCT/US2019/68444 filed on Dec. 23, 2019 based on U.S. Provisional Application No. 62/784,318 filed Dec. 21, 2018, each of which is incorporated by reference in its entirety.

[0004] Another example of such new generation of vaccines are recombinant native-like viral trimer vaccines^{[70-72]}. An exemplary disclosure on compositions comprising nucleic acids encoding such structural trimers and methods of preparing and using the same was provided in PCT application No. PCT/US2020/26948 filed on Apr. 6, 2020 based on U.S. Provisional Application No. 62/829,629 filed on Apr. 4, 2019, each of which is incorporated by reference in its entirety.

[0005] Coronaviruses are a group of viruses that cause diseases in mammals and birds. Coronaviruses were first discovered in the 1960s. The earliest virus from the family of Coronaviridae discovered were infectious bronchitis virus in chickens and two viruses from the nasal cavities of human patients with the common cold that were subsequently named human coronavirus 229E (HCoV-229E) and human coronavirus OC43 (HCoV-OC43). Other members of this family have since been identified, including SARS-CoV in 2003, HCoV NL63 in 2004, HKU1 in 2005, MERS-CoV in 2012, and SARS-CoV-2 (formerly known as 2019-nCoV or novel coronavirus 2019, which caused the global COVID-19 pandemic). Most of these have involved serious respiratory tract infections.

[0006] Symptoms of coronavirus infection vary in species. In chicken, for instance, they cause an upper respiratory tract disease, while in cows and pigs they cause diarrhea. In humans, coronaviruses cause respiratory tract infections that are typically mild, such as some cases of the common cold (among other possible causes, predominantly rhinoviruses), though rarer forms can be lethal, such as SARS, MERS, and COVID-19.

[0007] Coronaviruses vary significantly in risk factor. Some can kill more than 30% of those infected (such as MERS-CoV), and some are relatively harmless, such as the common cold. Coronaviruses cause flu-like symptoms, such as fever and sore throat from swollen adenoids, primarily in the winter and early spring seasons. Coronaviruses can cause pneumonia—either direct viral pneumonia or a secondary bacterial pneumonia—and may cause bronchitis—either direct viral bronchitis or a secondary bacterial bronchitis. The much publicized human coronavirus discovered in 2003, SARS-CoV, which causes severe acute respiratory syndrome (SARS), has a unique pathogenesis because it causes both upper and lower respiratory tract infections. The novel human coronavirus discovered in 2019, SARS-CoV-2, causes mild symptoms, most often fever, dry cough, and shortness of breath, to complications including pneumonia and acute respiratory distress syndrome.

### SUMMARY OF EMBODIMENTS

[0008] Since it was emerged in late 2019, SARS-CoV-2 was rapidly characterized as a new member of the betacoronavirus genus, closely related to several bat coronaviruses and to severe acute respiratory syndrome coronavirus (SARS-CoV). Compared to SARS-CoV, however, SARS-CoV-2 appears to be more readily transmitted from human to human.

[0009] SARS-CoV-2 makes use of a densely glycosylated Spike (S) protein to gain entry into host cells. The S protein is a trimeric class I fusion protein that exists in a metastable prefusion conformation that undergoes a substantial structural rearrangement to fuse the viral membrane with the host cell membrane^{[73, 74]}. This process is triggered when the S1 subunit of the S protein binds to a host cell receptor. Receptor binding destabilizes the prefusion trimer, resulting in shedding of the S1 subunit and transition of the S2 subunit to a stable postfusion conformation^{[75]}. To engage a host cell receptor, the receptor-binding domain (RBD) of S1 undergoes hinge-like conformational movements that transiently hide or expose the determinants of receptor binding. These two states are referred to as the “down” conformation and the “up” conformation, where down corresponds to the receptor-inaccessible state and up corresponds to the receptor-accessible state, which is thought to be less stabler^{[76-79]}. Because of the indispensable function of the S protein, it represents a target for vaccine design and development. See Wrapp et al., Science, 2020, 367, 1260-1263.

[0010] In one aspect, the disclosure relates to a composition comprising an expressible nucleic acid sequence. In some embodiments, the expressible nucleic acid sequence comprises a first nucleic acid sequence encoding a scaffold domain comprising a self-assembling polypeptide and a second nucleic acid sequence encoding a viral antigen from a virus of the family Coronaviridae. In some embodiments, the expressible nucleic acid sequence further comprises a third nucleic acid sequence encoding a leader sequence. In some embodiments, the expressible nucleic acid sequence further comprises a nucleic acid sequence encoding a linker, said nucleic acid sequence positioned between the first nucleic acid sequence and the second nucleic acid sequence in the 5′ to 3′ orientation.

[0011] In other embodiments, the expressible nucleic acid sequence comprises a first nucleic acid sequence encoding a leader sequence and a second nucleic acid sequence encoding a soluble viral trimer or a soluble monomer thereof, wherein the soluble viral trimer or the soluble monomer thereof is from a virus of the family Coronaviridae. In some embodiments, the expressible nucleic acid sequence further comprises a third nucleic acid sequence encoding a linker. In some embodiments, the soluble viral trimer or the soluble monomer thereof comprises at least a portion of SARS-CoV-2 spike protein. In some embodiments, the expressible nucleic acid sequence further comprises a nucleic acid sequence encoding a self-assembling polypeptide or a functional fragment or variant thereof.

[0012] In some embodiments, the disclosure relates to a vaccine comprising a polypeptide. In some embodiments, the polypeptide comprises a scaffold domain comprising a self-assembling polypeptide and an antigen domain comprising a viral antigen from a virus of the family Coronaviridae. In some embodiments, the polypeptide further comprises a leader sequence. In some embodiments, the polypeptide further comprises a linker domain comprising a linker peptide located between the scaffold domain and the antigen domain. In some embodiments, the polypeptide comprises at least 70% sequence identity to SEQ ID NO: 70, SEQ ID NO: 73, SEQ ID NO: 76, SEQ ID NO: 79, SEQ ID NO: 82, SEQ ID NO: 85, SEQ ID NO: 88 or SEQ ID NO: 91, or a functional fragment or variant thereof.

[0013] In some embodiments, the polypeptide comprises a leader sequence and an antigen domain comprising a soluble viral trimer or a soluble monomer thereof, wherein the soluble viral trimer or the soluble monomer thereof is from a virus of the family Coronaviridae. In some embodiments, the polypeptide further comprises one or a plurality of linker. In some embodiments, the soluble viral trimer or the soluble monomer thereof comprises at least a portion of SARS-CoV-2 spike protein. In some embodiments, the polypeptide further comprises a self-assembling polypeptide or a functional fragment or variant thereof. In some embodiments, the polypeptide comprises at least 70% sequence identity to SEQ ID NO: 94, SEQ ID NO: 97, SEQ ID NO: 100, SEQ ID NO: 103, SEQ ID NO: 106, SEQ ID NO: 109, SEQ ID NO: 112, SEQ ID NO: 115, SEQ ID NO: 118, SEQ ID NO: 121, SEQ ID NO: 124, SEQ ID NO: 127, SEQ ID NO: 130, SEQ ID NO: 133, SEQ ID NO: 136, SEQ ID NO: 139, SEQ ID NO: 142, SEQ ID NO: 145, SEQ ID NO: 148, SEQ ID NO: 151, SEQ ID NO: 154, SEQ ID NO: 157 or SEQ ID NO: 160, or a functional fragment or variant thereof.

[0014] In a further aspect, the disclosure relates to a cell comprising an expressible nucleic acid sequence. In some embodiments, the expressible nucleic acid sequence comprises a first nucleic acid sequence encoding a scaffold domain comprising a self-assembling polypeptide and a second nucleic acid sequence encoding a viral antigen from a virus of the family Coronaviridae. In some embodiments, the expressible nucleic acid sequence further comprises a third nucleic acid sequence encoding a leader sequence. In some embodiments, the expressible nucleic acid sequence further comprises a nucleic acid sequence encoding a linker, said nucleic acid sequence positioned between the first nucleic acid sequence and the second nucleic acid sequence in the 5′ to 3′ orientation. In some embodiments, the expressible nucleic acid sequence comprises a nucleic acid sequence encoding a leader sequence, a nucleic acid sequence encoding a scaffold domain, a nucleic acid sequence encoding a linker, and a nucleic acid sequence encoding a viral antigen from Coronaviridae, in the 5′ to 3′ orientation.

[0015] In some embodiments, the expressible nucleic acid sequence comprises a first nucleic acid sequence encoding a leader sequence and a second nucleic acid sequence encoding a soluble viral trimer or a soluble monomer thereof, wherein the soluble viral trimer or the soluble monomer thereof is from a virus of the family Coronaviridae. In some embodiments, the expressible nucleic acid sequence further comprises a third nucleic acid sequence encoding a linker. In some embodiments, the soluble viral trimer or the soluble monomer thereof comprises at least a portion of SARS-CoV-2 spike protein. In some embodiments, the expressible nucleic acid sequence further comprises a nucleic acid sequence encoding a self-assembling polypeptide or a functional fragment or variant thereof.

[0016] In some embodiments, the self-assembling polypeptide of the disclosure is from Aquifex aeolicus, Helicobacter pylori, Pyrococcus furiosus or Thermotoga maritima. In some embodiments, the self-assembling polypeptide of the disclosure comprises at least 70% sequence identity to SEQ ID NO: 8, SEQ ID NO: 10, SEQ ID NO: 12, SEQ ID NO: 14, SEQ ID NO: 16, SEQ ID NO: 18 or SEQ ID NO: 20, or a functional fragment or variant thereof.

[0017] In some embodiments, the viral antigen of the disclosure is an antigen from a coronavirus. In some embodiments, the viral antigen is an antigen from SARS-CoV-2. In some embodiments, the viral antigen comprises at least 70% sequence identity to SEQ ID NO: 60, SEQ ID NO: 62, SEQ ID NO: 64, SEQ ID NO: 66, SEQ ID NO: 171, SEQ ID NO: 172, SEQ ID NO: 173, SEQ ID NO: 174, SEQ ID NO: 175, SEQ ID NO: 176 or SEQ ID NO: 177, or a functional fragment or variant thereof.

[0018] In some embodiments, the leader sequence of the disclosure comprises at least 70% sequence identity to SEQ ID NO: 1 or SEQ ID NO: 5, or a functional fragment or variant thereof.

[0019] In some embodiments, the linker of the disclosure comprises at least 70% sequence identity to SEQ ID NO: 22, SEQ ID NO: 23, SEQ ID NO: 24, SEQ ID NO: 25, SEQ ID NO: 26, SEQ ID NO: 32, SEQ ID NO: 34, SEQ ID NO: 36, SEQ ID NO: 38, SEQ ID NO: 40, SEQ ID NO: 42, SEQ ID NO: 44, SEQ ID NO: 46, SEQ ID NO: 48, SEQ ID NO: 50, SEQ ID NO: 52, SEQ ID NO: 54, SEQ ID NO: 56 or SEQ ID NO: 58, or a functional fragment or variant thereof.

[0020] In some embodiments, the expressible nucleic acid sequence of the disclosure comprises at least 70% sequence identity to SEQ ID NO: 68, SEQ ID NO: 69, SEQ ID NO: 71, SEQ ID NO: 72, SEQ ID NO: 74, SEQ ID NO: 75, SEQ ID NO: 77, SEQ ID NO: 78, SEQ ID NO: 80, SEQ ID NO: 81, SEQ ID NO: 83, SEQ ID NO: 84, SEQ ID NO: 86, SEQ ID NO: 87, SEQ ID NO: 89 or SEQ ID NO: 90, or a functional fragment or variant thereof. In some embodiments, the expressible nucleic acid sequence of the disclosure encodes a polypeptide comprising at least 70% sequence identity to SEQ ID NO: 70, SEQ ID NO: 73, SEQ ID NO: 76, SEQ ID NO: 79, SEQ ID NO: 82, SEQ ID NO: 85, SEQ ID NO: 88 or SEQ ID NO: 91, or a functional fragment or variant thereof. In some embodiments, the expressible nucleic acid sequence of the disclosure comprises at least 70% sequence identity to SEQ ID NO: 92, SEQ ID NO: 93, SEQ ID NO: 95, SEQ ID NO: 96, SEQ ID NO: 98, SEQ ID NO: 99, SEQ ID NO: 101, SEQ ID NO: 102, SEQ ID NO: 104, SEQ ID NO: 105, SEQ ID NO: 107, SEQ ID NO: 108, SEQ ID NO: 110, SEQ ID NO: 111, SEQ ID NO: 113, SEQ ID NO: 114, SEQ ID NO: 116, SEQ ID NO: 117, SEQ ID NO: 119, SEQ ID NO: 120, SEQ ID NO: 122, SEQ ID NO: 123, SEQ ID NO: 125, SEQ ID NO: 126, SEQ ID NO: 128, SEQ ID NO: 129, SEQ ID NO: 131, SEQ ID NO: 132, SEQ ID NO: 134, SEQ ID NO: 135, SEQ ID NO: 137, SEQ ID NO: 138, SEQ ID NO: 140, SEQ ID NO: 141, SEQ ID NO: 143, SEQ ID NO: 144, SEQ ID NO: 146, SEQ ID NO: 147, SEQ ID NO: 149, SEQ ID NO: 150, SEQ ID NO: 152, SEQ ID NO: 153, SEQ ID NO: 155, SEQ ID NO: 156, SEQ ID NO: 158 or SEQ ID NO: 159, or a functional fragment or variant thereof. In some embodiments, the expressible nucleic acid sequence of the disclosure encodes a polypeptide comprising at least 70% sequence identity to SEQ ID NO: 94, SEQ ID NO: 97, SEQ ID NO: 100, SEQ ID NO: 103, SEQ ID NO: 106, SEQ ID NO: 109, SEQ ID NO: 112, SEQ ID NO: 115, SEQ ID NO: 118, SEQ ID NO: 121, SEQ ID NO: 124, SEQ ID NO: 127, SEQ ID NO: 130, SEQ ID NO: 133, SEQ ID NO: 136, SEQ ID NO: 139, SEQ ID NO: 142, SEQ ID NO: 145, SEQ ID NO: 148, SEQ ID NO: 151, SEQ ID NO: 154, SEQ ID NO: 157 or SEQ ID NO: 160, or a functional fragment or variant thereof.

[0021] In some embodiments, the expressible nucleic acid sequence of the disclosure is operably linked to one or a plurality of regulatory sequences. In some embodiments, the expressible nucleic acid sequence of the disclosure is comprised in a nucleic acid molecule. In some embodiments, the expressible nucleic acid sequence of the disclosure is comprised in a nucleic acid molecule which is a plasmid.

[0022] In some embodiments, the disclosure relates to a pharmaceutical composition comprising a pharmaceutically effective amount of any of the composition disclosed herein and a pharmaceutically acceptable carrier. In some embodiments, the pharmaceutical composition comprises any of the disclosed composition from about 1 to about 100 micrograms. In some embodiments, the pharmaceutical composition comprises any of the disclosed composition from about 1 to about 20 micrograms.

[0023] In some embodiments, the disclosure relates to a method of vaccinating a subject comprising administering a therapeutically effective amount of any of the disclosed pharmaceutical composition to the subject.

[0024] In other aspects, the disclosure relates to a method of inducing an immune response in a subject comprising administering to the subject any of the disclosed pharmaceutical composition. In some embodiments, the immune response is an antigen-specific immune response against SARS-CoV-2. In some embodiments, the subject is diagnosed with or suspected of having a SARS-CoV-2 infection. In some embodiments, the immune response is an antigen-specific immune response against a SARS-CoV-2 antigen. In some embodiments, the immune response is an antigen-specific immune response against a SARS-CoV-2 spike antigen.

[0025] In some embodiments, the disclosure relates to a method of neutralizing one or a plurality of viruses in a subject comprising administering to the subject any of the disclosed pharmaceutical composition.

[0026] In some embodiments, the disclosure relates to a method of stimulating a therapeutically effective antigen-specific immune response against a virus in a mammal infected with a virus comprising administering a therapeutically effective amount of any of the disclosed pharmaceutical composition. In some embodiments, the subject is infected with SARS-CoV-2.

[0027] In some embodiments, the disclosure relates to a method of inducing expression of a self-assembling vaccine in a subject comprising administering any of the disclosed pharmaceutical composition. In some embodiments, the method is free of administering any polypeptide directly to the subject.

[0028] In some embodiments, the administering in any of the disclosed methods is accomplished by oral administration, parenteral administration, sublingual administration, transdermal administration, rectal administration, transmucosal administration, topical administration, inhalation, buccal administration, intrapleural administration, intravenous administration, intraarterial administration, intraperitoneal administration, subcutaneous administration, intramuscular administration, intranasal administration, intrathecal administration, and intraarticular administration, or a combination thereof. In some embodiments, the therapeutically effective amount used in any of the disclosed methods is from about 1 to about 2000 micrograms of the expressible nucleic acid sequence. In some embodiments, the therapeutically effective amount used in any of the disclosed methods is from about 1 to about 30 micrograms of the expressible nucleic acid sequence. In some embodiments, the disclosed method is free of activating any mannose-binding lectin or complement process. In some embodiments, the subject is a human. In some embodiments, the therapeutically effective dose used in any of the disclosed method is from about 0.3 microgram of the composition per kilogram of the subject to about 30 micrograms per kilogram of the subject. In some embodiments, the therapeutically effective dose used in any of the disclosed method is from about 0.001 microgram of composition per kilogram of the subject to about 0.05 microgram per kilogram of the subject.

[0029] The disclosure further relates to a DNA vaccine comprising an expressible nucleic acid sequence encoding a polypeptide comprising at least about 70% sequence identity to SEQ ID NO: 70, SEQ ID NO: 73, SEQ ID NO: 76, SEQ ID NO: 79, SEQ ID NO: 82, SEQ ID NO: 85, SEQ ID NO: 88 or SEQ ID NO: 91, or a functional fragment or variant thereof. In some embodiments, the expressible nucleic acid sequence of the disclosed DNA vaccine comprises at least about 70% sequence identity to SEQ ID NO: 68, SEQ ID NO: 71, SEQ ID NO: 74, SEQ ID NO: 77, SEQ ID NO: 80, SEQ ID NO: 83, SEQ ID NO: 86, SEQ ID NO: 89, SEQ ID NO: 92, SEQ ID NO: 95, SEQ ID NO: 98, SEQ ID NO: 101, SEQ ID NO: 104, SEQ ID NO: 107, SEQ ID NO: 110, SEQ ID NO: 113, SEQ ID NO: 116, SEQ ID NO: 119, SEQ ID NO: 122, SEQ ID NO: 125, SEQ ID NO: 128, SEQ ID NO: 131, SEQ ID NO: 134, SEQ ID NO: 137, SEQ ID NO: 140, SEQ ID NO: 143, SEQ ID NO: 146, SEQ ID NO: 149, SEQ ID NO: 152, SEQ ID NO: 155 or SEQ ID NO: 158, or a functional fragment or variant thereof. In some embodiments, the disclosed DNA vaccine further comprises a pharmaceutically acceptable excipient. In some embodiments, the pharmaceutically acceptable excipient further comprises an adjuvant.

[0030] The disclosure also relates to a RNA vaccine comprising an expressible nucleic acid sequence encoding a polypeptide comprising at least about 70% sequence identity to SEQ ID NO: 70, SEQ ID NO: 73, SEQ ID NO: 76, SEQ ID NO: 79, SEQ ID NO: 82, SEQ ID NO: 85, SEQ ID NO: 88 or SEQ ID NO: 91, or a functional fragment or variant thereof. In some embodiments, the expressible nucleic acid sequence of the disclosed RNA vaccine comprises at least about 70% sequence identity to SEQ ID NO: 69, SEQ ID NO: 72, SEQ ID NO: 75, SEQ ID NO: 78, SEQ ID NO: 81, SEQ ID NO: 84, SEQ ID NO: 87, SEQ ID NO: 90, SEQ ID NO: 93, SEQ ID NO: 96, SEQ ID NO: 99, SEQ ID NO: 102, SEQ ID NO: 105, SEQ ID NO: 108, SEQ ID NO: 111, SEQ ID NO: 114, SEQ ID NO: 117, SEQ ID NO: 120, SEQ ID NO: 123, SEQ ID NO: 126, SEQ ID NO: 129, SEQ ID NO: 132, SEQ ID NO: 135, SEQ ID NO: 138, SEQ ID NO: 141, SEQ ID NO: 144, SEQ ID NO: 147, SEQ ID NO: 150, SEQ ID NO: 153, SEQ ID NO: 156 or SEQ ID NO: 159, or a functional fragment or variant thereof. In some embodiments, the disclosed RNA vaccine further comprises a pharmaceutically acceptable excipient. In some embodiments, the pharmaceutically acceptable excipient further comprises an adjuvant.

[0031] The disclosure relates to a viral particle or a self-assemblying particle comprising either a pharmaceutically effective amount of antigen from Coronaviridae in a trimer configuration and/or a viral particle comprising a pharmaceutically effective amount of any nuclec acid sequence disclosed herein. In some embodiments, the viral particle is an adeno-associated vector (AAV) or lentiviral vector.

### BRIEF DESCRIPTION OF THE DRAWINGS

[0032] The accompanying drawings, which are incorporated in and constitute a part of this specification, illustrate several embodiments of the disclosed method and compositions and together with the description, serve to explain the principles of the disclosed method and compositions.

[0033] FIG. 1A-1B show the structure of SARS-CoV-2 in the prefusion conformation. FIG. 1A is a schematic of SARS-CoV-2 S primary structure grayscaled by domain. Domains that could not be visualized in the final map are colored white. SS: signal sequence; S2′: S2′ protease cleavage site; FP: fusion peptide; HR1: heptad repeat 1; CH: central helix; CD: connector domain; HR2: heptad repeat 2; TM: transmembrane domain; CT: cytoplasmic tail. Arrows denote protease cleavage sites. FIG. 1B shows the side and top views of the prefusion structure of the SARS-CoV-2 protein with a single RBD in the up conformation. The two RBD down protomers are shown as cryo-EM density in either white or gray and the RBD up protomer is shown in ribbons grayscaled corresponding to the schematic in (A). Source: Wrapp et al., Science, 2020, 367, 1260-1263.

[0034] FIG. 2 shows that the fusion peptide from SARS-CoV2 was scaffolded onto a modified version of Lumazine Synthase (60mer) with an expression domain as a genetic fusion. SARS-CoV-2 fusion peptide nanoparticle shown on the left is decorated by sixty copies of the fusion peptide.

[0035] FIG. 3A-3B depict the expression of 2 SARS-CoV-2 fusion peptide nanoparticle designs. FIG. 3A depicts the expression of construct WuhanS_FP_L9GT60_pVax. FIG. 3B depicts the expression of construct WuhanS_FP12_L9GT60_pVax. For SARS-Cov2 fusion peptide purification, DNA was maxiprepped and transfected into Expi293 cells with PEI. Constructs were harvested on day 6. Constructs were purified by lectin chromatography and run on a size-exclusion column (GE Superdex S6 increase). Control nanoparticles elute at ˜12.5 ml using the same protocols.

[0036] FIG. 4A-4E show the results of SARS-CoV-2 fusion peptide binding ELISA. FIG. 4A: Week 1 post vaccination; FIG. 4B: Week 2 post vaccination; FIG. 4C: Week 3 post vaccination; FIG. 4D: Week 4 post vaccination; FIG. 4E: Comparison of endpoint titers to WuFuse1 between WuhanS_FP12_L9GT60_pVax (“S_FP12_L9GT60”) and WuhanS_FP_L9GT60_pVax (“S_FP_L9GT60”). ELISA plates were coated with 2 μg/mL streptavidin at room temperature for 8 hours and then blocked overnight at 4° C. The next day, the plates were incubated with fusion peptide at 2 μg/mL at room temp for 2 hours and then with sera at 37° C. for 2 hours, followed by addition of anti-mouse IgG (H+L)-HRP to the plates. The plates were developed with TMB substrates for 5 minutes, absorbances at 450 nm and 570 nm were recorded.

[0037] FIG. 5A-5E show the results of SARS-CoV-2 full-length spike protein binding ELISA. FIG. 5A: Week 1 post vaccination; FIG. 5B: Week 2 post vaccination; FIG. 5C: Week 3 post vaccination; FIG. 5D: Week 4 post vaccination; FIG. 5E: Comparison of endpoint titers to SARS-CoV-2 full-length spike protein (“FL SARS2 Spike”) between WuhanS_FP12_L9GT60_pVax (“S_FP12_L9GT60”) and WuhanS_FP_L9GT60_pVax (“S_FP_L9GT60”). ELISA plates were coated with 1 μg/mL anti-histine antibody at room temp for 8 hours and then blocked overnight at 4° C. The next day, the plates were incubated with His-tagged SARS-CoV-2 spike protein at 2 μg/mL at room temperature for 2 hours and then with sera at 37° C. for 2 hours, followed by addition of anti-mouse IgG (H+L)-HRP to the plates. The plates were developed with TMB substrates for 5 minutes, absorbances at 450 nm and 570 nm were recorded.

### DETAILED DESCRIPTION

[0038] The disclosed method and compositions may be understood more readily by reference to the following detailed description of particular embodiments and the examples included therein and to the figures and their previous and following description. It is to be understood that the disclosed method and compositions are not limited to specific synthetic methods, specific analytical techniques, or to particular reagents unless otherwise specified, and, as such, may vary. It is also to be understood that the terminology used herein is for the purpose of describing particular embodiments only, and is not intended to limit the scope of the present disclosure which will be limited only by the appended claims.

### Definitions

[0039] Unless defined otherwise, all technical and scientific terms used herein have the same meaning as commonly understood by one of ordinary skill in the art to which the disclosure pertains.

[0040] It must be noted that as used herein and in the appended claims, the singular forms “a”, “an,” and “the” include plural reference unless the context clearly dictates otherwise. Thus, for example, reference to “a nucleic acid sequence” includes a plurality of nucleotides that are formed, reference to “the nucleic acid sequence” is a reference to one or more nucleic acid sequences and equivalents thereof known to those skilled in the art, and so forth.

[0041] Ranges may be expressed herein as from “about” one particular value, and/or to “about” another particular value. When such a range is expressed, also specifically contemplated and considered disclosed is the range from the one particular value and/or to the other particular value unless the context specifically indicates otherwise. Similarly, when values are expressed as approximations, by use of the antecedent “about,” it will be understood that the particular value forms another, specifically contemplated embodiment that should be considered disclosed unless the context specifically indicates otherwise. It will be further understood that the endpoints of each of the ranges are significant both in relation to the other endpoint, and independently of the other endpoint unless the context specifically indicates otherwise. The term “about” as used herein when referring to a measurable value such as an amount, a temporal duration, and the like, is meant to encompass variations of ±20%, ±10%, ±5%, ±1%, ±0.5%, or ±0.1% from the specified value, as such variations are appropriate to perform the disclosed methods.

[0042] As used herein, the terms “activate,” “stimulate,” “enhance” “increase” and/or “induce” (and like terms) are used interchangeably to generally refer to the act of improving or increasing, either directly or indirectly, a concentration, level, function, activity, or behavior relative to the natural, expected, or average, or relative to a control condition. “Activate” in context of an immunotherapy refers to a primary response induced by ligation of a cell surface moiety. For example, in the context of receptors, such stimulation entails the ligation of a receptor and a subsequent signal transduction event. Further, the stimulation event may activate a cell and upregulate or downregulate expression or secretion of a molecule. Thus, indirect or direct ligation of cell surface moieties, even in the absence of a direct signal transduction event, may result in the reorganization of cytoskeletal structures, or in the coalescing of cell surface moieties, each of which could serve to enhance, modify, or alter subsequent cellular responses. As used herein, the terms “activating CD8+ T cells” or “CD8+ T cell activation” refer to a process (e.g., a signaling event) causing or resulting in one or more cellular responses of a CD8+ T cell (CTL), selected from: proliferation, differentiation, cytokine secretion, cytotoxic effector molecule release, cytotoxic activity, and expression of activation markers. As used herein, an “activated CD8+ T cell” refers to a CD8+ T cell that has received an activating signal, and thus demonstrates one or more cellular responses, selected from proliferation, differentiation, cytokine secretion, cytotoxic effector molecule release, cytotoxic activity, and expression of activation markers. Suitable assays to measure CD8+ T cell activation are known in the art and are described herein.

[0043] The term “combination therapy” as used herein is meant to refer to administration of one or more therapeutic agents in a sequential manner, that is, wherein each therapeutic agent is administered at a different time; as well as administration of these therapeutic agents, or at least two of the therapeutic agents, in a substantially simultaneous manner. In some embodiments, the therapeutic agents are administered within 1, 2, 3, 4, 5, 6, 7, 8, 9, or 10 minutes within each other. Substantially simultaneous administration can be accomplished, for example, by administering to the subject a single dose having a fixed ratio of each therapeutic agent or in multiple, individual doses for each of the therapeutic agents. For example, one combination of the present disclosure may comprise a pooled sample of one or more nucleic acid molecules comprising one or a plurality of expressible nucleic acid sequences and an adjuvant and/or an anti-viral agent administered at the same or different times. In some embodiments, the pharmaceutical composition of the disclosure can be formulated as a single, co-formulated pharmaceutical composition comprising one or more nucleic acid molecules comprising one or a plurality of expressible nucleic acid sequences and one or more adjuvants and/or one or more anti-viral agents. As another example, a combination of the present disclosure (e.g., DNA or RNA vaccines and anti-viral agent) may be formulated as separate pharmaceutical compositions that can be administered at the same or different time. As used herein, the term “simultaneously” is meant to refer to administration of one or more agents at the same time. For example, in certain embodiments, antiviral vaccine or immunogenic composition and antiviral agents are administered simultaneously). Simultaneously includes administration contemporaneously or immediately sequentially, that is during the same period of time. In certain embodiments, the one or more agents are administered simultaneously in the same hour, or simultaneously in the same day. Sequential or substantially simultaneous administration of each therapeutic agent can be effected by any appropriate route including, but not limited to, oral routes, intravenous routes, sub-cutaneous routes, intramuscular routes, direct absorption through mucous membrane tissues (e.g., nasal, mouth, vaginal, and rectal), and ocular routes (e.g., intravitreal, intraocular, etc.). The therapeutic agents can be administered by the same route or by different routes. For example, one component of a particular combination may be administered by intravenous injection while the other component(s) of the combination may be administered intramuscularly only. The components may be administered in any therapeutically effective sequence. A “combination” embraces groups of compounds or non-small chemical compound therapies useful as part of a combination therapy. In some embodiments, the therapeutic agent is an anti-retroviral therapy, (such as one or a combination of efavirenz, lamivudine and tenofovir disoproxil fumarate) or anti-flu therapy (such as TamiFlu®). In some embodiments, the therapeutic agent is one or a combiantion of: abacavir/dolutegravir/lamivudine (Triumeq), dolutegravir/rilpivirine (Juluca), elvitegravir/cobicistat/emtricitabine/tenofovir disoproxil fumarate (Stribild), elvitegravir/cobicistat/emtricitabine/tenofovir alafenami de (Genvoya), efavirenz/emtricitabine/tenofovir disoproxil fumarate (Atripla), emtricitabine/rilpivirine/tenofovir disoproxil fumarate (Complera), emtricitabine/rilpivirine/tenofovir alafenamide (Odefsey), bictegravir, emtricitabine, and tenofovir alafenamide (Biktarvy). In some embodiments, the therapeutic agent is one or a combination of a reverse transcrioptase inhibitor of a retrovirus such as efavirenz (Sustiva), etravirine (Intelence), nevirapine (Viramune), nevirapine extended-release (Viramune XR), rilpivirine (Edurant), delavirdine mesylate (Rescriptor). In some embodiments, the therapeutic agent is one or a combination of a protease inhibitor of a retrovirus, such as: atazanavir/cobicistat (Evotaz), darunavir/cobicistat (Prezcobix), lopinavir/ritonavir (Kaletra), ritonavir (Norvir), atazanavir (Reyataz), darunavir (Prezista), fosamprenavir (Lexiva), tipranavir (Aptivus).

[0044] As used herein, “expression” refers to the process by which a polynucleotide is transcribed from a DNA template (such as into and mRNA or other RNA transcript) and/or the process by which a transcribed mRNA (or administered mRNA) is translated into peptides, polypeptides, or proteins. Transcripts and encoded polypeptides may be collectively referred to as “gene product.” If the polynucleotide is derived from genomic DNA, expression may include splicing of the mRNA in a eukaryotic cell. In some embodiments, the at least one expressible nucleic acid sequence comprises only DNA nucleotides, RNA nucleotides or comprises both RNA and DNA nucleotides. In some embodiments, the at least one expressible nucleic acid consist of RNA. In some embodiments, the at least one expressible nucleic acid consist of DNA.

[0045] The terms “functional fragment” means any portion of a polypeptide or nucleic acid sequence from which the respective full-length polypeptide or nucleic acid relates that is of a sufficient length and has a sufficient structure to confer a biological affect that is at least similar or substantially similar to the full-length polypeptide or nucleic acid upon which the fragment is based. In some embodiments, a functional fragment is a portion of a full-length or wild-type nucleic acid sequence that encodes any one of the nucleic acid sequences disclosed herein, and said portion encodes a polypeptide of a certain length and/or structure that is less than full-length but encodes a domain that still biologically functional as compared to the full-length or wild-type protein. In some embodiments, the functional fragment may have a reduced biological activity, about equivalent biological activity, or an enhanced biological activity as compared to the wild-type or full-length polypeptide sequence upon which the fragment is based (such wild-type or full length sequences “reference sequences” or each individually a “reference sequence”). In some embodiments, the functional fragment is derived from the sequence of an organism, such as a human. In such embodiments, the functional fragment may retain about 99%, 98%, 97%, 96%, 95%, 94%, 93%, 92%, 91%, or 90% sequence identity to the wild-type human sequence upon which the sequence is derived. In some embodiments, the functional fragment may retain about 85%, 80%, 75%, 70%, 65%, or 60% sequence identity to the wild-type sequence upon which the sequence is derived.

[0046] By “fragment” is meant a portion of a polypeptide or nucleic acid molecule. This portion contains, preferably, at least about 5%, 10%, 20%, 30%, 40%, 50%, 60%, 70%, 80%, or about 90% of the entire length of the reference nucleic acid molecule or polypeptide. A fragment may contain about 5, 10, 20, 30, 40, 50, 60, 70, 80, 90, 100, 200, 300, 400, 500, 600, 700, 800, 900, 1000 or more nucleotides or amino acids.

[0047] “Optional” or “optionally” means that the subsequently described event, circumstance, or material may or may not occur or be present, and that the description includes instances where the event, circumstance, or material occurs or is present and instances where it does not occur or is not present.

[0048] The phrase “and/or,” as used herein in the specification and in the claims, should be understood to mean “either or both” of the elements so conjoined, i.e., elements that are conjunctively present in some cases and disjunctively present in other cases. Other elements may optionally be present other than the elements specifically identified by the “and/or” clause, whether related or unrelated to those elements specifically identified unless clearly indicated to the contrary. Thus, as a non-limiting example, a reference to “A and/or B,” when used in conjunction with open-ended language such as “comprising” can refer, in some embodiments, to A without B (optionally including elements other than B); in another embodiments, to B without A (optionally including elements other than A); in yet another embodiments, to both A and B (optionally including other elements); etc.

[0049] As used herein in the specification and in the claims, “or” should he understood to have the same meaning as “and/or” as defined above. For example, when separating items in a list, “or” or “and/or” shall be interpreted as being inclusive, i.e., the inclusion of at least one, but also including more than one, of a number or list of elements, and, optionally, additional unlisted items. Only terms clearly indicated to the contrary, such as “only one of” or “exactly one of,” or, when used in the claims, “consisting of,” will refer to the inclusion of exactly one element of a number or list of elements. In general, the term “or” as used herein shall only be interpreted as indicating exclusive alternatives (i.e. “one or the other but not both”) when preceded by terms of exclusivity, “either,” “one of,” “only one of,” or “exactly one of” “Consisting essentially of,” when used in the claims, shall have its ordinary meaning as used in the field of patent law.

[0050] As used herein an “antigen” is meant to refer to any substance that elicits an immune response.

[0051] As used herein, the term “electroporation,” “electro-permeabilization,” or “electro-kinetic enhancement” (“EP”), are used interchangeably and are meant to refer to the use of a transmembrane electric field pulse to induce microscopic pathways (pores) in a bio-membrane; their presence allows biomolecules such as plasmids, oligonucleotides, siRNA, drugs, ions, and/or water to pass from one side of the cellular membrane to the other. In some of the disclosed methods of treatment or prevention, the method comprises a step of electroporation of a subject's tissue for a sufficient time and with a sufficient electrical field capable of inducing uptake of the pharmaceutical compositions disclosed herein into the antigen-presenting cells. In some embodiments, the cells are antigen presenting cells.

[0052] The term “pharmaceutically acceptable excipient,” “pharmaceutically acceptable carrier” or “pharmaceutically acceptable diluent” as used herein is meant to refer to an excipient, carrier or diluent that can be administered to a subject, together with an agent or the pharmaceutical compositions disclosed herein, and which is inert or fails to eliminate the pharmacological activity of the active agent of the pharmaceutical composition. In some embodiments, the pharmaceutically acceptable carrier does fails to destroy or is incapable of eliminating the pharmacological activity of an active agent/vaccine and and is nontoxic when administered in doses sufficient to deliver a therapeutic amount of the active agent. The term “pharmaceutically acceptable salt” of nucleic acids as used herein may be an acid or base salt that is generally considered in the art to be suitable for use in contact with the tissues of human beings or animals without excessive toxicity, irritation, allergic response, or other problem or complication. Such salts include mineral and organic acid salts of basic residues such as amines, as well as alkali or organic salts of acidic residues such as carboxylic acids. Specific pharmaceutical salts include, but are not limited to, salts of acids such as hydrochloric, phosphoric, hydrobromic, malic, glycolic, fumaric, sulfuric, sulfamic, suifanilic, formic, toluenesulfonie, methanesulfonic, benzene sulfonic, ethane disulfonic, 2-hydroxyethyl sulfonic, nitric, benzoic, 2-acetoxybenzoic, citric, tartaric, lactic, stearic, salicylic, glutamic, ascorbic, pamoic, succinic, fumaric, maleic, propionic, hydroxymaleic, hydroiodic, phenyiacetic, alkanoic such as acetic, HOOC—(CH₂)n-COOH where n is 0-4, and the like. Similarly, pharmaceutically acceptable cations include, but are not limited to sodium, potassium, calcium, aluminum, lithium and ammonium. Those of ordinary skill in the art will recognize from this disclosure and the knowledge in the art that further pharmaceutically acceptable salts for the pooled viral specific antigens or polynucleotides provided herein, including those listed by Remington's Pharmaceutical Sciences, 17th ed., Mack Publishing Company, Easton, Pa., p. 1418 (1985). In general, a pharmaceutically acceptable acid or base salt can be synthesized from a parent compound that contains a basic or acidic moiety by any conventional chemical method. Briefly, such salts can be prepared by reacting the free acid or base forms of these compounds with a stoichiometric amount of the appropriate base or acid in an appropriate solvent.

[0053] As used herein, the terms “prevent,” “preventing,” “prevention,” “prophylactic treatment,” and the like, are meant to refer to reducing the probability of developing a disease or condition in a subject, who does not have, but is at risk of or susceptible to developing a disease or condition.

[0054] As used herein, the term “purified” means that the polynucleotide or polypeptide or fragment, variant, or derivative thereof is substantially free of other biological material with which it is naturally associated, or free from other biological materials derived, e.g., from a recombinant host cell that has been genetically engineered to express the polypeptide of the present disclosure. That is, e.g., a purified polypeptide of the present disclosure is a polypeptide that is at least from about 70 to 100% pure, i.e., the polypeptide is present in a composition wherein the polypeptide constitutes from about 70 to about 100% by weight of the total composition. In some embodiments, the purified polypeptide of the present disclosure is from about 75% to about 99% by weight pure, from about 80% to about 99% by weight pure, from about 90 to about 99% by weight pure, or from about 95% to about 99% by weight pure.

[0055] The terms “subject,” “individual,” and “patient” are used interchangeably herein to refer to a vertebrate, preferably a mammal, more preferably a human. Mammals include, but are not limited to, murine, simians, humans, farm animals, cows, pigs, goats, sheep, horses, dogs, sport animals, and pets. Tissues, cells and their progeny obtained in vivo or cultured in vitro are also encompassed by the definition of the term “subject.” The term “subject” is also used throughout the specification in some embodiments to describe an animal from which a cell sample is taken or an animal to which a disclosed cell or nucleic acid sequences have been administered. In some embodiment, the subject is a human. For treatment of those conditions which are specific for a specific subject, such as a human being, the term “patient” may be interchangeably used. In some instances in the description of the present disclosure, the term “patient” will refer to human patients suffering from a particular disease or disorder. In some embodiments, the subject may be a non-human animal. The term “mammal” encompasses both humans and non-humans and includes but is not limited to humans, non-human primates, canines, felines, murine, bovines, equines, caprine, and porcines.

[0056] The term “therapeutic effect” as used herein is meant to refer to some extent of relief of one or more of the symptoms of a disorder (e.g., SARS-CoV-2 infection) or its associated pathology. A “therapeutically effective amount” as used herein is meant to refer to an amount of an agent which is effective, upon single or multiple dose administration (such as a first, second and/or third booster) to the cell or subject, in prolonging the survivability of the patient with such a disorder, reducing one or more signs or symptoms of the disorder, preventing or delaying, and the like beyond that expected in the absence of such treatment. A “therapeutically effective amount” is intended to qualify the amount required to achieve a therapeutic effect. A physician or veterinarian having ordinary skill in the art can readily determine and prescribe the “therapeutically effective amount” (e.g., ED50) of the pharmaceutical composition required. For example, the physician or veterinarian could start doses of the compounds of the present disclosure employed in a pharmaceutical composition at levels lower than that required in order to achieve the desired therapeutic effect and gradually increase the dosage until the desired effect is achieved.

[0057] The terms “treat,” “treated,” “treating,” “treatment,” and the like as used herein are meant to refer to reducing or ameliorating a disorder and/or symptoms associated therewith (e.g., a viral infection). “Treating” can refer to administration of the DNA and/or RNA vaccines described herein to a subject after the onset, or suspected onset, of a viral infection. “Treating” includes the concepts of “alleviating,” which refers to lessening the frequency of occurrence or recurrence, or the severity, of any symptoms or other ill effects related to a virus and/or the side effects associated with viral therapy. The term “treating” also encompasses the concept of “managing” which refers to reducing the severity of a particular disease or disorder in a patient or delaying its recurrence, e.g., lengthening the period of remission in a patient who had suffered from the disease. It is appreciated that, although not precluded, treating a disorder or condition does not require that the disorder, condition, or symptoms associated therewith be completely eliminated.

[0058] For any therapeutic agent described herein the therapeutically effective amount may be initially determined from preliminary in vitro studies and/or animal models. A therapeutically effective dose may also be determined from human data. The applied dose can be adjusted based on the relative bioavailability and potency of the administered agent. Adjusting the dose to achieve maximal efficacy based on the methods described above and other well-known methods is within the capabilities of the ordinarily skilled artisan. General principles for determining therapeutic effectiveness, which may be found in Chapter 1 of Goodman and Gilman's The Pharmacological Basis of Therapeutics, 10th Edition, McGraw-Hill (New York) (2001), incorporated herein by reference, are summarized below. Pharmacokinetic principles provide a basis for modifying a dosage regimen to obtain a desired degree of therapeutic efficacy with a minimum of unacceptable adverse effects. In situations where the drug's plasma concentration can be measured and related to the therapeutic window, additional guidance for dosage modification can be obtained. Drug products are considered to be pharmaceutical equivalents if they contain the same active ingredients and are identical in strength or concentration, dosage form, and route of administration. Two pharmaceutically equivalent drug products are considered to be bioequivalent when the rates and extents of bioavailability of the active ingredient in the two products are not significantly different under suitable test conditions.

[0059] The terms “polynucleotide,” “oligonucleotide” and “nucleic acid” are used interchangeably throughout and include DNA molecules (e.g., cDNA or genomic DNA), RNA molecules (e.g., mRNA), analogs of the DNA or RNA generated using nucleotide analogs (e.g., peptide nucleic acids and non-naturally occurring nucleotide analogs), and hybrids thereof. The nucleic acid molecule can be single-stranded or double-stranded. In some embodiments, the nucleic acid molecules of the disclosure comprise a contiguous open reading frame encoding an antibody, or a fragment thereof, as described herein. “Nucleic acid” or “oligonucleotide” or “polynucleotide” as used herein may mean at least two nucleotides covalently linked together. The depiction of a single strand also defines the sequence of the complementary strand. Thus, a nucleic acid also encompasses the complementary strand of a depicted single strand. Many variants of a nucleic acid may be used for the same purpose as a given nucleic acid. Thus, a nucleic acid also encompasses substantially identical nucleic acids and complements thereof. A single strand provides a probe that may hybridize to a target sequence under stringent hybridization conditions. Thus, a nucleic acid also encompasses a probe that hybridizes under stringent hybridization conditions. Nucleic acids may be single stranded or double stranded, or may contain portions of both double stranded and single stranded sequence. The nucleic acid may be DNA, both genomic and cDNA, RNA, or a hybrid, where the nucleic acid may contain combinations of deoxyribo- and ribo-nucleotides, and combinations of bases including uracil, adenine, thymine, cytosine, guanine, inosine, xanthine hypoxanthine, isocytosine and isoguanine. Nucleic acids may be obtained by chemical synthesis methods or by recombinant methods. A nucleic acid will generally contain phosphodiester bonds, although nucleic acid analogs maybe included that may have at least one different linkage, e.g., phosphoramidate, phosphorothioate, phosphorodithioate, or 0-methylphosphoroamidite linkages and peptide nucleic acid backbones and linkages. Other analog nucleic acids include those with positive backbones; non-ionic backbones, and non-ribose backbones, including those described in U.S. Pat. Nos. 5,235,033 and 5,034,506, which are incorporated by reference in their entireties.

[0060] Nucleic acids containing one or more non-naturally occurring or modified nucleotides are also included within one definition of nucleic acids. The modified nucleotide analog may he located for example at the 5′-end and/or the 3′-end of the nucleic acid molecule. Representative examples of nucleotide analogs may be selected from sugar- or backbone-modified ribonucleotides. It should be noted, however, that also nucleobase-modified ribonucleotides, i.e. ribonucleotides, containing a non-naturally occurring nucleobase instead of a naturally occurring nucleobase such as uridines or cytidines modified at the 5-position, e.g. 5-(2-amino)propyl uridine, 5-bromo uridine; adenosines and guanosines modified at the 8-position, e.g. 8-bromo guanosine; deaza nucleotides, e.g. 7-deaza-adenosine; 0- and N-alkylated nucleotides, e.g. N6-methyl adenosine are suitable. The 2′-OH-group may be replaced by a group selected from H, OR, R, halo, SH, SR, NH₂, NHR, N₂ or CN, wherein R is C₁-C₆ alkyl, alkenyl or alkynyl and halo is F, Cl, Br or I. Modified nucleotides also include nucleotides conjugated with cholesterol through, e.g., a hydroxyprolinol linkage as described in Krutzfeldt et al., Nature (Oct. 30, 2005), Soutschek et al., Nature 432:173-178 (2004), and U.S. Patent Publication No. 20050107325, which are incorporated herein by reference in their entireties. Modified nucleotides and nucleic acids may also include locked nucleic acids (LNA), as described in U.S. Pat. No. 20020115080, which is incorporated herein by reference. Additional modified nucleotides and nucleic acids are described in U.S. Patent Publication No. 20050182005, which is incorporated herein by reference in its entirety. Modifications of the ribose-phosphate backbone may be done for a variety of reasons, e.g., to increase the stability and half-life of such molecules in physiological environments, to enhance diffusion across cell membranes, or as probes on a biochip. Mixtures of naturally occurring nucleic acids and analogs may be made; alternatively, mixtures of different nucleic acid analogs, and mixtures of naturally occurring nucleic acids and analogs may be made. In some embodiments, the expressible nucleic acid sequence is in the form of DNA. In some embodiments, the expressible nucleic acid is in the form of RNA with a sequence that encodes the polypeptide sequences disclosed herein and, in some embodiments, the expressible nucleic acid sequence is an RNA/DNA hybrid molecule that encodes any one or plurality of polypeptide sequences disclosed herein.

[0061] As used herein, the term “nucleic acid molecule” is a molecule that comprises one or more nucleotide sequences that encode one or more proteins. In some embodiments, a nucleic acid molecule comprises initiation and termination signals operably linked to regulatory elements including a promoter and polyadenylation signal capable of directing expression in the cells of the individual to whom the nucleic acid molecule is administered. In some embodiments, the nucleic acid molecule also includes a plasmid containing one or more nucleotide sequences that encode one or a plurality of viral antigens. In some embodiments, the disclosure relates to a pharmaceutical composition comprising a first, second, third or more nucleic acid molecule, each of which encoding one or a plurality of viral antigens and at least one of each plasmid comprising one or more of the compositions disclosed herein.

[0062] The terms “polypeptide,” “peptide” and “protein” are used interchangeably herein to refer to polymers of amino acids of any length. The polymer may be linear or branched, it may comprise modified amino acids, and it may be interrupted by non-natural amino acids or chemical groups that are not amino acids. The terms also encompass an amino acid polymer that has been modified; for example, disulfide bond formation, glycosylation, lipidation, acetylation, phosphorylation, or any other manipulation, such as conjugation with a labeling component. As used herein the term “amino acid” includes natural and/or unnatural or synthetic amino acids, including glycine and both the D or L optical isomers, and amino acid analogs and peptidomimetics.

[0063] The “percent identity” or “percent homology” of two polynucleotide or two polypeptide sequences is determined by comparing the sequences using the GAP computer program (a part of the GCG Wisconsin Package, version 10.3 (Accelrys, San Diego, Calif.)) using its default parameters. “Identical” or “identity” as used herein in the context of two or more nucleic acids or amino acid sequences, may mean that the sequences have a specified percentage of residues that are the same over a specified region. The percentage may be calculated by optimally aligning the two sequences, comparing the two sequences over the specified region, determining the number of positions at which the identical residue occurs in both sequences to yield the number of matched positions, dividing the number of matched positions by the total number of positions in the specified region, and multiplying the result by 100 to yield the percentage of sequence identity. In cases where the two sequences are of different lengths or the alignment produces one or more staggered ends and the specified region of comparison includes only a single sequence, the residues of single sequence are included in the denominator but not the numerator of the calculation. When comparing DNA and RNA, thymine (T) and uracil (U) may be considered equivalent. Identity may he performed manually or by using a computer sequence algorithm such as BLAST or BLAST 2.0. Briefly, the BLAST algorithm, which stands for Basic Local Alignment Search Tool is suitable for determining sequence similarity. Software for performing BLAST analyses is publicly available through the National Center for Biotechnology Information (ncbi.nlm.nih.gov). This algorithm involves first identifying high scoring sequence pair (HSPs) by identifying short words of length Win the query sequence that either match or satisfy some positive-valued threshold score T when aligned with a word of the same length in a database sequence. T is referred to as the neighborhood word score threshold (Altschul et al., supra). These initial neighborhood word hits act as seeds for initiating searches to find HSPs containing them. The word hits are extended in both directions along each sequence for as far as the cumulative alignment score can be increased. Extension for the word hits in each direction are halted when: 1) the cumulative alignment score falls off by the quantity X from its maximum achieved value; 2) the cumulative score goes to zero or below, due to the accumulation of one or more negative-scoring residue alignments; or 3) the end of either sequence is reached. The Blast algorithm parameters W, T and X determine the sensitivity and speed of the alignment. The Blast program uses as defaults a word length (W) of 11, the BLOSUM62 scoring matrix (see Henikoff et al., Proc. Natl. Acad. Sci. USA, 1992, 89, 10915-10919, which is incorporated herein by reference in its entirety) alignments (B) of 50, expectation (E) of 10, M=5, N=4, and a comparison of both strands. The BLAST algorithm (Karlin et al., Proc. Natl. Acad. Sci. USA, 1993, 90, 5873-5787, which is incorporated herein by reference in its entirety) and Gapped BLAST perform a statistical analysis of the similarity between two sequences. One measure of similarity provided by the BLAST algorithm is the smallest sum probability (P(N)), which provides an indication of the probability by which a match between two nucleotide sequences would occur by chance. For example, a nucleic acid is considered similar to another if the smallest sum probability in comparison of the test nucleic acid to the other nucleic acid is less than about 1, less than about 0.1, less than about 0.01, and less than about 0.001. Two single-stranded polynucleotides are “the complement” of each other if their sequences can be aligned in an anti-parallel orientation such that every nucleotide in one polynucleotide is opposite its complementary nucleotide in the other polynucleotide, without the introduction of gaps, and without unpaired nucleotides at the 5′ or the 3′ end of either sequence. A polynucleotide is “complementary” to another polynucleotide if the two polynucleotides can hybridize to one another under moderately stringent conditions. Thus, a polynucleotide can be complementary to another polynucleotide without being its complement.

[0064] The term “hybridization” or “hybridizes” as used herein refers to the formation of a duplex between nucleotide sequences that are sufficiently complementary to form duplexes via Watson-Crick base pairing. Two nucleotide sequences are “complementary” to one another when those molecules share base pair organization homology. “Complementary” nucleotide sequences will combine with specificity to form a stable duplex under appropriate hybridization conditions. For instance, two sequences are complementary when a section of a first sequence can bind to a section of a second sequence in an anti-parallel sense wherein the 3′-end of each sequence binds to the 5′-end of the other sequence and each A, T(U), G and C of one sequence is then aligned with a T(U), A, C and G, respectively, of the other sequence. RNA sequences can also include complementary G=U or U=G base pairs. Thus, two sequences need not have perfect homology to be “complementary.” Usually two sequences are sufficiently complementary when at least about 90% (preferably at least about 95%) of the nucleotides share base pair organization over a defined length of the molecule.

[0065] By “substantially identical” is meant nucleic acid molecule (or polypeptide) exhibiting at least about 50% identity to a reference amino acid sequence (for example, any one of the amino acid sequences described herein) or nucleic acid sequence (for example, any one of the nucleic acid sequences described herein). In some embodiments, such a sequence is at least about 60%, 70%, 80% or 85%, 90%, 95% or even 99% identical at the amino acid level or nucleic acid to the sequence used for comparison.

[0066] A nucleotide sequence is “operably linked” to a regulatory sequence if the regulatory sequence affects the expression (e.g., the level, timing, or location of expression) of the nucleotide sequence. A “regulatory sequence” is a nucleic acid that affects the expression (e.g., the level, timing, or location of expression) of a nucleic acid to which it is operably linked. The regulatory sequence can, for example, exert its effects directly on the regulated nucleic acid, or through the action of one or more other molecules (e.g., polypeptides that bind to the regulatory sequence and/or the nucleic acid). Examples of regulatory sequences include promoters, enhancers and other expression control elements (e.g., polyadenylation signals). Further examples of regulatory sequences are described in, for example, Goeddel, 1990, Gene Expression Technology: Methods in Enzymology 185, Academic Press, San Diego, Calif. and Baron et al., 1995, Nucleic Acids Res. 23:3605-06.

[0067] A “vector” is a nucleic acid that can be used to introduce another nucleic acid linked to it into a cell. One type of vector is a “plasmid,” which refers to a linear or circular double stranded DNA molecule into which additional nucleic acid segments can be ligated. Another type of vector is a viral vector (e.g., replication defective retroviruses, adenoviruses and adeno-associated viruses), comprising additional, exogenous DNA, RNA or hybrid DNA or RNA molecules that can be introduced into the viral genome. Certain vectors are capable of autonomous replication in a host cell into which they are introduced (e.g., bacterial vectors comprising a bacterial origin of replication and episomal mammalian vectors). Other vectors (e.g., non-episomal mammalian vectors) are integrated into the genome of a host cell upon introduction into the host cell, and thereby are replicated along with the host genome. An “expression vector” is a type of vector that can direct the expression of a chosen polynucleotide. The disclosure relates to any one or plurality of vectors that comprise nucleic acid sequences encoding any one or plurality of amino acid sequence disclosed herein. In some embodiments, the expression vector includes from about 30 to about 100,000 nucleotides (e.g., from about 30 to about 50, from about 30 to about 100, from about 30 to about 250, from about 30 to about 500, from about 30 to about 1,000, from about 30 to about 1,500, from about 30 to about 3,000, from about 30 to about 5,000, from about 30 to about 7,000, from about 30 to about 10,000, from about 30 to about 25,000, from about 30 to about 50,000, from about 30 to about 70,000, from about 100 to about 250, from about 100 to about 500, from about 100 to about 1,000, from about 100 to about 1,500, from about 100 to about 3,000, from about 100 to about 5,000, from about 100 to about 7,000, from about 100 to about 10,000, from about 100 to about 25,000, from about 100 to about 50,000, from about 100 to about 70,000, from about 100 to about 100,000, from about 500 to about 1,000, from about 500 to about 1,500, from about 500 to about 2,000, from about 500 to about 3,000, from about 500 to about 5,000, from about 500 to about 7,000, from about 500 to about 10,000, from about 500 to about 25,000, from about 500 to about 50,000, from about 500 to about 70,000, from about 500 to about 100,000, from about 1,000 to about 1,500, from about 1,000 to about 2,000, from about 1,000 to about 3,000, from about 1,000 to about 5,000, from about 1,000 to about 7,000, from about 1,000 to about 10,000, from about 1,000 to about 25,000, from about 1,000 to about 50,000, from about 1,000 to about 70,000, from about 1,000 to about 100,000, from about 1,500 to about 3,000, from about 1,500 to about 5,000, from about 1,500 to about 7,000, from about 1,500 to about 10,000, from about 1,500 to about 25,000, from about 1,500 to about 50,000, from about 1,500 to about 70,000, from about 1,500 to about 100,000, from about 2,000 to about 3,000, from about 2,000 to about 5,000, from about 2,000 to about 7,000, from about 2,000 to about 10,000, from about 2,000 to about 25,000, from about 2,000 to about 50,000, from about 2,000 to about 70,000, and from about 2,000 to about 100,000 nucleotides).

[0068] The term “vaccine” as used herein is meant to refer to a composition capable of generating immunity for the prophylaxis and/or treatment of diseases (e.g., viral infections). In some embodiments, the vaccine is a composition capable of generating therapeutically effective immunity for the prophylaxis or treatment of Coronaviridae infection or propagation in a subject. Accordingly, vaccines are medicaments which comprise antigens in protein and/or nucleic acid forms and are in animals for generating specific defense and protective substance by vaccination. A “vaccine composition” can include a pharmaceutically acceptable excipient, carrier or diluent. A “vaccine composition” or “nucleic acid vaccine composition” as used herein can comprise a DNA vaccine, a RNA vaccine or a combination thereof.

[0069] “Variants” are intended to mean substantially similar sequences. For nucleic acid molecules, a variant comprises a nucleic acid molecule having deletions (i.e., truncations) at the 5′ and/or 3′ end; deletion and/or addition of one or more nucleotides at one or more internal sites in the native polynucleotide; and/or substitution of one or more nucleotides at one or more sites in the native polynucleotide. As used herein, a “native” nucleic acid molecule or polypeptide comprises a naturally occurring or endogenous nucleotide sequence or amino acid sequence, respectively. For nucleic acid molecules, conservative variants include those sequences that, because of the degeneracy of the genetic code, encode the amino acid sequence of one of the polypeptides of the disclosure. Variant nucleic acid molecules also include synthetically derived nucleic acid molecules, such as those generated, for example, by using site-directed mutagenesis but which still encode a protein of the disclosure. Generally, variants of a particular nucleic acid molecule of the disclosure will have at least about 70%, 75%, 80%, 85%, 90%, 91%, 92%, 93%, 94%, 95%, 96%, 97%, 98%, 99% or more sequence identity to that particular polynucleotide as determined by sequence alignment programs and parameters as described elsewhere herein. Variants of a particular nucleic acid molecule of the disclosure (i.e., the reference DNA sequence) can also be evaluated by comparison of the percent sequence identity between the polypeptide encoded by a variant nucleic acid molecule and the polypeptide encoded by the reference nucleic acid molecule. Percent sequence identity between any two polypeptides can be calculated using sequence alignment programs and parameters described elsewhere herein. Where any given pair of nucleic acid molecule of the disclosure is evaluated by comparison of the percent sequence identity shared by the two polypeptides that they encode, the percent sequence identity between the two encoded polypeptides is at least about 70%, 75%, 80%, 85%, 90%, 91%, 92%, 93%, 94%, 95%, 96%, 97%, 98%, 99% or more sequence identity. In some embodiments, the term “variant” protein is intended to mean a protein derived from the native protein by deletion (so-called truncation) of one or more amino acids at the N-terminal and/or C-terminal end of the native protein; deletion and/or addition of one or more amino acids at one or more internal sites in the native protein; or substitution of one or more amino acids at one or more sites in the native or wild-type protein upon which the variant structure is based. Variant proteins encompassed by the present disclosure are biologically active, that is they continue to possess the desired biological activity of the native protein as described herein. Such variants may result from, for example, genetic polymorphism or from human manipulation. Biologically active variants of a protein of the disclosure will have at least about 70%, 75%, 80%, 85%, 90%, 91%, 92%, 93%, 94%, 95%, 96%, 97%, 98%, 99% or more sequence identity to the amino acid sequence for the native protein as determined by sequence alignment programs and parameters described elsewhere herein. A biologically active variant of a protein of the disclosure may differ from that protein by as few as 1-15 amino acid residues, as few as 1-10, such as 6-10, as few as 5, as few as 4, 3, 2, or even 1 amino acid residue. The proteins or polypeptides of the disclosure may be altered in various ways including amino acid substitutions, deletions, truncations, and insertions. Methods for such manipulations are generally known in the art. For example, amino acid sequence variants and fragments of the proteins can be prepared by mutations in the nucleic acid sequence that encode the amino acid sequence recombinantly. In some embodiments, the nucleic acid molecules or the nucleic acid sequences comprise conservative mutations of 1, 2, 3, 4, 5, 6, 7, 8, 9, 10 or more nucleotides.

[0070] As used herein, “SARS-CoV-2” refers to severe acute respiratory syndrome-related coronavirus-2 or a subtype or variant thereof. Non-limiting examples of the SARS-CoV-2 virus, variants and subtypes thereof are described, for example, in Morais et al. (Sci. Rep., 2020, 10(1):18289), Zhao et al. (PLoS Comput Biol., 2020, 16(9):e1008269), Forster et al. (PNAS, 2020, 117(17):9241-9243), and Tang et al. (National Science Review, 2020, 7(6):1012-1023), all of which are incorporated by reference herein. In some embodiments, the SARS-CoV-2 is one of the 6 subtypes and 10 tentative subtypes identified in Morais et al. (Sci. Rep., 2020, 10(1):18289). In some embodiments, the SARS-CoV-2 is one of the 3 SARS-CoV-2 variants identified in Foster et al. (PNAS, 2020, 117(17):9241-9243). In some embodiments, the SARS-CoV-2 is one of the two SARS-CoV-2 subtypes identified in Tang et al. (National Science Review, 2020, 7(6):1012-1023). In some embodiments, the SARS-CoV-2 is SARS-CoV-2 hCoV-19/Australia/VIC01/2020 or a variant thereof. In some embodiments, SARS-COV-2 comprises the sequences as described in NCBI Reference Sequence: NC 045512.2 or a variant thereof. In some embodiments, SARS-CoV-2 comprises the sequence as described in GenBank: MN908947.3 or a variant thereof. In some embodiments, the SARS-Cov-2 variant is the B.1.1.7 varian, also referred to as lineage B.1.1.7, VOC 202012/01 or 20I/501Y.V1. In some embodiments, the SARS-Cov-2 variant is the B.1.351 variant, also referred to as B.1.351 lineage. In some embodiments, the SARS-Cov-2 variant is the B.1.1.28 subclade (renamed “P.1”). In some embodiments, the SARS-Cov-2 variant is the B.1.1.7 variant, also referred to as B.1.1.7 lineage or 20I/501Y.V1.

[0071] As used herein, a “scaffold domain” refers to a region of a polypeptide that structurally facilitates, or acts as a scaffold for, presentation of one or a plurality of viral antigens. In some embodiments, a scaffold domain of the disclosure comprises a self-assembling polypeptide which, when expressed, forms an inner scaffold or core upon which one or a plurality of viral antigens are displayed. In some embodiments, the self-assemblying peptide forms a three dimensional shape with identical single polypeptide surfaces. In some embodiments, the scaffold doman forms a secondary and/or tertiary structure that is a polyhedron. In some embodiments, the scaffold domain encodes a monomer or series of monomers that form a 7, 14, 20, 28 or 60 faces of a polyhedron upon which antigens are encoded or displayed.

[0072] As used herein, the term “trimer” refers to a protein complex formed by three individual monomers. In some embodiments, the monomer subunits of the trimer are bound together to form a trimer by non-covalent protein-protein interactions.

[0073] Finally, it should be understood that all of the individual values and sub-ranges of values contained within an explicitly disclosed range are also specifically contemplated and should be considered disclosed unless the context specifically indicates otherwise. The foregoing applies regardless of whether in particular cases some or all of these embodiments are explicitly disclosed.

[0074] Unless defined otherwise, all technical and scientific terms used herein have the same meanings as commonly understood by one of skill in the art to which the disclosed method and compositions belong. Although any methods and materials similar or equivalent to those described herein can be used in the practice or testing of the present method and compositions, the particularly useful methods, devices, and materials are as described. Publications cited herein and the material for which they are cited are hereby specifically incorporated by reference. Nothing herein is to be construed as an admission that the present disclosure is not entitled to antedate such disclosure by virtue of prior disclosure. No admission is made that any reference constitutes prior art. The discussion of references states what their authors assert, and applicants reserve the right to challenge the accuracy and pertinency of the cited documents. It will be clearly understood that, although a number of publications are referred to herein, such reference does not constitute an admission that any of these documents forms part of the common general knowledge in the art.

[0075] Throughout the description and claims of this specification, the word “comprise” and variations of the word, such as “comprising” and “comprises,” means “including but not limited to,” and is not intended to exclude, for example, other additives, components, integers or steps. In particular, in methods stated as comprising one or more steps or operations it is specifically contemplated that each step comprises what is listed (unless that step includes a limiting term such as “consisting of”), meaning that each step is not intended to exclude, for example, other additives, components, integers or steps that are not listed in the step.

### A. Nucleic Acid Compositions

[0076] Disclosed are compositions and pharmaceutical compositions comprising one or plurality of expressible nucleic acid sequences. In some embodiments, the expressible nucleic acid sequence is a DNA. In other embodiments, the expressible nucleic acid sequence is a RNA. In some embodiments, the expressible nucleic acid is operably linked to one or a plurality of regulatory sequences. In some embodiments, the expressible nucleic acid sequence is comprised and forms a part of a nucleic acid molecule, such as a vector or plasmid.

[0077] In one aspect, the expressible nucleic acid sequence of the disclosure comprises a first nucleic acid sequence encoding a scaffold domain comprising a self-assembling polypeptide or a pharmaceutically acceptable salt thereof, and a second nucleic acid sequence encoding an antigen domain comprising a viral antigen or a pharmaceutically acceptable salt thereof. The self-assembling polypeptide is a self-assembling peptide that is expressed to facilitate presentation of the viral antigen. Transformed or transfected cells exposed to such expressible nucleic acid sequences can produce the self-assembling peptide which is enveloped by the viral antigens, thereby stimulating the viral antigen-specific immune response against the antigen. In some embodiments, the antigen-specific immune response is a therapeutically effective immune response against the virus from which the antigen amino acid sequence is obtained. In some embodiments, the viral antigen encoded by the expressible nucleic acid of the disclosure comprises a coronaviral antigen. In some embodiments, the expressible nucleic acid sequence further comprises a third nucleic acid sequence encoding a leader sequence or a pharmaceutically acceptable salt thereof. In some embodiments, the leader sequence is an IgE or IgG leader sequence. In some embodiments, the expressible nucleic acid sequence further comprises a fourth nucleic acid sequence encoding a linker peptide or a pharmaceutically acceptable salt thereof, wherein the fourth nucleic acid sequence is positioned between the first nucleic acid sequence and the second nucleic acid sequence in the 5′ to 3′ orientation. In some embodiments, the expressible nucleic acid sequence comprises a first nucleic acid sequence encoding a scaffold domain comprising a self-assembling polypeptide or a pharmaceutically acceptable salt thereof, a second nucleic acid sequence encoding an antigen domain comprising a viral antigen or a pharmaceutically acceptable salt thereof, and a third nucleic acid sequence encoding a leader sequence or a pharmaceutically acceptable salt thereof. In some embodiments, the expressible nucleic acid sequence comprises a first nucleic acid sequence encoding a scaffold domain comprising a self-assembling polypeptide or a pharmaceutically acceptable salt thereof, a second nucleic acid sequence encoding an antigen domain comprising a viral antigen or a pharmaceutically acceptable salt thereof, a third nucleic acid sequence encoding a leader sequence or a pharmaceutically acceptable salt thereof, and a fourth nucleic acid sequence encoding a linker peptide or a pharmaceutically acceptable salt thereof, wherein the fourth nucleic acid sequence is positioned between the first nucleic acid sequence and the second nucleic acid sequence in the 5′ to 3′ orientation.

[0078] In some embodiments, the expressible nucleic acid sequence of the disclosure comprises a nucleic acid sequence encoding a viral trimer polypeptide, a functional fragment thereof or a pharmaceutically acceptable salt thereof. In some embodiments, the expressible nucleic acid sequence comprises, in a 5′ to 3′ orientation, a first nucleic acid sequence encoding a leader sequence or a pharmaceutically acceptable salt thereof, and a second nucleic acid sequence encoding a viral trimer polypeptide, a functional fragment or variant thereof or a pharmaceutically acceptable salt thereof. In some embodiments, the leader sequence is an IgE or IgG leader sequence. In some embodiments, the expressible nucleic acid sequence comprises, in a 5′ to 3′ orientation, a first nucleic acid sequence encoding a leader sequence or a pharmaceutically acceptable salt thereof, and a second nucleic acid sequence encoding a viral polypeptide that is a component of a viral trimer, a functional fragment or variant thereof or a pharmaceutically acceptable salt thereof. In some embodiments, the viral polypeptide that is a component of a viral trimer is a monomer of a viral trimer, such that, upon expression, the monomers spontaneously aggregate to form a trimeric viral polypeptide. In some embodiments, the viral trimer encoded by the expressible nucleic acid of the disclosure comprises a coronaviral trimer. In some embodiments, the viral trimer comprises the spike protein of SARS-CoV-2, a functional fragment or variant thereof or a pharmaceutically acceptable salt thereof.

[0079] In some embodiments, the nucleic acid sequences encoding the viral antigens or viral trimers comprised in the expressible nucleic acid of the disclosure comprise one or a plurality of mutations so to tailor the vaccine induced responses. Such mutations result in creating glycan sites in the encoded polypeptide so that glycosylation events can be obtained. In some embodiments, such glycan modifications or mutations decrease the bottom reactivity. In some embodiments, such glycan modifications or mutations increase antigen activity.

[0080] 1. Leader Sequence

[0081] The expressible nucleic acid sequence of the present disclosure optionally comprises a nucleic acid sequence encoding a leader sequence, a functional fragment or variant thereof or a pharmaceutically acceptable salt thereof. A “leader sequence” may from time to time refer to a “signal peptide” and thus, the terms “leader sequence” and “signal peptide” are used interchangeably herein and refer to an amino acid sequence that can be linked at the amino terminus of a protein set forth herein. Signal peptides/leader sequences typically direct localization of a protein. Signal peptides/leader sequences used herein preferably facilitate secretion of the protein from the cell in which it is produced. Signal peptides/leader sequences are often cleaved from the remainder of the protein, often referred to as the mature protein, upon secretion from the cell. Signal peptides/leader sequences, when present, are linked at the N terminus of the protein. The presence of a leader sequence may be required for proper secretion of the viral antigen or trimer encoded by the expressible nucleic acid sequence of the disclosure.

[0082] A non-limiting example of the leader sequence is the IgE leader sequence comprising the amino acid sequence of MDWTWILFLVAAATRVHS (SEQ ID NO: 1; also named “MD39”) encoded by one of the following nucleic acid sequences:

(SEQ ID NO: 2; “MD39”)
atggactggacatggattctgttcctggtcgctgccgctacaagagtgca
ttcc;
(SEQ ID NO: 3; “CPG9.2”)
atggattggacttggattctgttcctggtcgcagcagccacacgagtgca
tagc;
and
(SEQ ID NO: 4)
atggactggacctggattctgttcctggtggccgccgccacaagggtgca
cagc.

[0083] Another non-limiting example of the leader sequence is the amino acid sequence of MDWTWRILFLVAAATGTHA (SEQ ID NO: 5) encoded by the nucleic acid sequence of atggactggacctggagaatcctgttcctggtggccgccgccaccggcacacacgccgatacacacttccccatctgcatcttttgctg tggctgttgccataggtccaagtgtgggatgtgctgcaaaact (SEQ ID NO: 6).

[0084] Thus, in some embodiments when the leader sequence is present, the leader sequence comprises at least about 60%, 65%, 70%, 75%, 80%, 85%, 86%, 87%, 88%, 89%, 90%, 91%, 92%, 93%, 94%, 95%, 96%, 97%, 98% or 99% sequence identity to SEQ ID NO: 1 or SEQ ID NO: 5, or a functional fragment or variant thereof. In some embodiments, the leader sequence comprises the amino acid sequence of SEQ ID NO: 1 or SEQ ID NO: 5, or a functional fragment or variant thereof. In some embodiments, the leader sequence is encoded by a nucleic acid sequence comprising at least about 60%, 65%, 70%, 75%, 80%, 85%, 86%, 87%, 88%, 89%, 90%, 91%, 92%, 93%, 94%, 95%, 96%, 97%, 98% or 99% sequence identity to SEQ ID NO: 2, SEQ ID NO: 3, SEQ ID NO: 4 or SEQ ID NO: 6, or a functional fragment or variant thereof. In some embodiments, the leader sequence is encoded by the nucleic acid sequence of SEQ ID NO: 2, SEQ ID NO: 3, SEQ ID NO: 4 or SEQ ID NO: 6, or a functional fragment or variant thereof. In other embodiments, the leader sequence is encoded by a nucleic acid sequence comprising at least about 60%, 65%, 70%, 75%, 80%, 85%, 86%, 87%, 88%, 89%, 90%, 91%, 92%, 93%, 94%, 95%, 96%, 97%, 98% or 99% sequence identity to a nucleic acid sequence that is complementary to SEQ ID NO: 2, SEQ ID NO: 3, SEQ ID NO: 4 or SEQ ID NO: 6, or a functional fragment or variant thereof. In some embodiments, the leader sequence is encoded by a nucleic acid sequence that is complementary to the nucleic acid sequence of SEQ ID NO: 2, SEQ ID NO: 3, SEQ ID NO: 4 or SEQ ID NO: 6, or a functional fragment or variant thereof

[0085] 2. Self-Assembling Polypeptide

[0086] The disclosure relates to an expressible nucleic acid sequence comprising at least one nucleic acid sequence encoding a scaffold domain comprising a self-assembling polypeptide, a functional fragment or variant thereof or a pharmaceutically acceptable salt thereof. Self-assembling polypeptide are polypeptides capable of undergoing spontaneous assembling into ordered nanostructures. Effectively self-assembling polypeptides can act as building blocks to form the scaffold domain of the present disclosure. In some embodiments, the self-assembling polypeptides encoded by the expressible nucleic acid sequence of the disclosure are monomeric forms of viral trimers or variants thereof. In some embodiments, the self-assembling polypeptides are monomers of nanoparticle structural proteins that self-assemble into nanoparticles upon expression. Any self-assembling polypeptide can be used. In some embodiments, the self assembling polypeptide is from Aquifex aeolicus, Helicobacter pylori, Pyrococcus furiosus or Thermotoga maritima.

[0087] A non-limiting example of a self-assembling polypeptide is the lumazine synthase of hyperthermophilic bacterium Aquifex aeolicus having the amino acid sequence of SEQ ID NO: 8 (LS scaffold) encoded by the nucleic acid sequence of SEQ ID NO: 7.

(SEQ ID NO: 7)
atgcagatctacgaaggaaaactgaccgctgagggactgaggttcggaat
tgtcgcaagccgcgcgaatcacgcactggtggataggctggtggaaggcg
ctatcgacgcaattgtccggcacggcgggagagaggaagacatcacactg
gtgagagtctgcggcagctgggagattcccgtggcagctggagaactggc
tcgaaaggaggacatcgatgccgtgatcgctattggggtcctgtgccgag
gagcaactcccagcttcgactacatcgcctcagaagtgagcaaggggctg
gctgatctgtccctggagctgaggaaacctatcacttttggcgtgattac
tgccgacaccctggaacaggcaatcgaggcggccggcacctgccatggaa
acaaaggctgggaagcagccctgtgcgctattgagatggcaaatctgttc
aaatctctgcga
(SEQ ID NO: 8)
MQIYEGKLTAEGLRFGIVASRANHALVDRLVEGAIDAIVRHGGREEDITL
VRVCGSWEIPVAAGELARKEDIDAVIAIGVLCRGATPSFDYIASEVSKGL
ADLSLELRKPITFGVITADTLEQAIEAAGTCHGNKGWEAALCAIEMANLF
KSLR

[0088] Another non-limiting example of a self-assembling polypeptide is ferritin from Helicobacter pylori having the amino acid sequence of SEQ ID NO: 10 (3BVE scaffold) encoded by the nucleic acid sequence of SEQ ID NO: 9.

(SEQ ID NO: 9)
gggctgagtaaggacattatcaagctgctgaacgaacaggtgaacaaaga
gatgcagtctagcaacctgtacatgtccatgagctcctggtgctataccc
actctctggacggagcaggcctgttcctgtttgatcacgccgccgaggag
tacgagcacgccaagaagctgatcatcttcctgaatgagaacaatgtgcc
cgtgcagctgacctctatcagcgcccctgagcacaagttcgagggcctga
cacagatctttcagaaggcctacgagcacgagcagcacatctccgagtct
atcaacaatatcgtggaccacgccatcaagtccaaggatcacgccacatt
caactttctgcagtggtacgtggccgagcagcacgaggaggaggtgctgt
ttaaggacatcctggataagatcgagctgatcggcaatgagaaccacggg
ctgtacctggcagatcagtatgtcaagggcatcgctaagtcaaggaaaag
c
(SEQ ID NO: 10)
GLSKDIIKLLNEQVNKEMQSSNLYMSMSSWCYTHSLDGAGLFLFDHAAEE
YEHAKKLIIFLNENNVPVQLTSISAPEHKFEGLTQIFQKAYEHEQHISES
INNIVDHAIKSKDHATFNFLQWYVAEQHEEEVLFKDILDKIELIGNENHG
LYLADQYVKGIAKSRKS

[0089] A yet another non-limiting example of a self-assembling polypeptide is PfV viral cage from Pyrococcus furiosus (2e0z) having the amino acid sequence of SEQ ID NO: 12 (RBE scaffold) encoded by the nucleic acid sequence of SEQ ID NO: 11.

(SEQ ID NO: 11)
ctgagcattgcccccacactgattaaccgggacaaaccctacaccaaaga
ggaactgatggagattctgagactggctattatcgctgagctggacgcca
tcaacctgtacgagcagatggcccggtattctgaggacgagaatgtgcgc
aagatcctgctggatgtggccagggaggagaaggcacacgtgggagagtt
catggccctgctgctgaacctggaccccgagcaggtgaccgagctgaagg
gcggctttgaggaggtgaaggagctgacaggcatcgaggcccacatcaac
gacaataagaaggaggagagcaacgtggagtatttcgagaagctgagatc
cgccctgctggatggcgtgaataagggcaggagcctgctgaagcacctgc
ctgtgaccaggatcgagggccagagcttcagagtggacatcatcaagttt
gaggatggcgtgcgcgtggtgaagcaggagtacaagcccatccctctgct
gaagaagaagttctacgtgggcatcagggagctgaacgacggcacctacg
atgtgagcatcgccacaaaggccggcgagctgctggtgaaggacgaggag
tccctggtcatccgcgagatcctgtctacagagggcatcaagaagatgaa
gctgagctcctgggacaatccagaggaggccctgaacgatctgatgaatg
ccctgcaggaggcatctaacgcaagcgccggaccattcggcctgatcatc
aatcccaagagatacgccaagctgctgaagatctatgagaagtccggcaa
gatgctggtggaggtgctgaaggagatcttccggggcggcatcatcgtga
ccctgaacatcgatgagaacaaagtgatcatctttgccaacacccctgcc
gtgctggacgtggtggtgggacaggatgtgacactgcaggagctgggacc
agagggcgacgatgtggcctttctggtgtccgaggccatcggcatcagga
tcaagaatccagaggcaatcgtggtgctggag
(SEQ ID NO: 12)
LSIAPTLINRDKPYTKEELMEILRLAIIAELDAINLYEQMARYSEDENVR
KILLDVAREEKAHVGEFMALLLNLDPEQVTELKGGFEEVKELTGIEAHIN
DNKKEESNVEYFEKLRSALLDGVNKGRSLLKHLPVTRIEGQSFRVDIIKF
EDGVRVVKQEYKPIPLLKKKFYVGIRELNDGTYDVSIATKAGELLVKDEE
SLVIREILSTEGIKKMKLSSWDNPEEALNDLMNALQEASNASAGPFGLII
NPKRYAKLLKIYEKSGKMLVEVLKEIFRGGIIVTLNIDENKVIIFANTPA
VLDVVVGQDVTLQELGPEGDDVAFLVSEAIGIRIKNPEAIVVLE

[0090] A further non-limiting example of a self-assembling polypeptide is the self-assembling polypeptide from Thermotoga maritima having the amino acid sequence of SEQ ID NO: 14 (13 scaffold) encoded by the nucleic acid sequence of SEQ ID NO: 13.

(SEQ ID NO: 13)
atgaagatggaagaactgttcaagaagcacaagatcgtggccgtgctgag
ggccaactccgtggaggaggccaagaagaaggccctggccgtgttcctgg
gcggcgtgcacctgatcgagatcacctttacagtgcccgacgccgatacc
gtgatcaaggagctgtctttcctgaaggagatgggagcaatcatcggagc
aggaaccgtgacaagcgtggagcagtgcagaaaggccgtggagagcggcg
ccgagtttatcgtgtcccctcacctggacgaggagatctctcagttctgt
aaggagaagggcgtgttttacatgccaggcgtgatgacccccacagagct
ggtgaaggccatgaagctgggccacacaatcctgaagctgttccctggcg
aggtggtgggcccacagtttgtgaaggccatgaagggccccttccctaat
gtgaagtttgtgcccaccggcggcgtgaacctggataacgtgtgcgagtg
gttcaaggcaggcgtgctggcagtgggcgtgggcagcgccctggtgaagg
gcacacccgtggaagtcgctgagaaggcaaaggcattcgtggaaaagatt
agggggtgtactgag
(SEQ ID NO: 14)
MKMEELFKKHKIVAVLRANSVEEAKKKALAVFLGGVHLIEITFTVPDADT
VIKELSFLKEMGAIIGAGTVTSVEQCRKAVESGAEFIVSPHLDEEISQFC
KEKGVFYMPGVMTPTELVKAMKLGHTILKLFPGEVVGPQFVKAMKGPFPN
VKFVPTGGVNLDNVCEWFKAGVLAVGVGSALVKGTPVEVAEKAKAFVEKI
RGCTE

[0091] Additional non-limiting examples of self-assembling polypeptides include: QB scaffold (SEQ ID NO: 16) encoded by the nucleic acid sequence of SEQ ID NO: 15;

(SEQ ID NO: 15)
gcaaagctggagacagtgacactgggcaacatcggcaaggacggcaagca
gacactggtgctgaatcccaggggcgtgaaccctaccaatggagtggcat
ctctgagccaggcaggagcagtgcctgccctggagaagagagtgaccgtg
tccgtgtctcagcccagcaggaacagaaagaattataaggtgcaggtgaa
gatccagaacccaaccgcctgcacagccaatggcagctgtgacccatccg
tgacaaggcaggcatacgcagatgtgaccttctcttttacacagtatagc
accgatgaggagagggccttcgtgcgcaccgagctggccgccctgctggc
atcccctctgctgattgacgctattgaccagctgaaccctgcttac
(SEQ ID NO: 16)
AKLETVTLGNIGKDGKQTLVLNPRGVNPTNGVASLSQAGAVPALEKRVTV
SVSQPSRNRKNYKVQVKIQNPTACTANGSCDPSVTRQAYADVTFSFTQYS
TDEERAFVRTELAALLASPLLIDAIDQLNPAY
ICI scaffold (SEQ ID NO: 18) encoded by the
nucleic acid sequence of SEQ ID NO: 17;
(SEQ ID NO: 17)
gaccctgagtttaccaaaaatgctctgaatgtcgtcaaaaatgatctgat
tgctaaggtggaccagctgagcggagagcaggaggtgctgaggggcgagc
tggaggccgccaagcaggcaaaggtgaaactggaaaaccgaatcaaggaa
ctggaagaagaactgaaaagagtc
(SEQ ID NO: 18)
DPEFTKNALNVVKNDLIAKVDQLSGEQEVLRGELEAAKQAKVKLENRIKE
LEEELKRV
and IC2 scaffold (SEQ ID NO: 20) encoded by the
nucleic acid sequence of SEQ ID NO: 19.
(SEQ ID NO: 19)
gccgaccccaagaaggtgctggataaagccaaagatcaggcagaaaatag
agtcagggaactgaagcagaagctggaggagctgtacaaggaggcccgga
agctggacctgacccaggagatgaggagaaagctggagctgcgctacatc
gccgccatgctgatggccatcggcgacatctataacgccatcaggcaggc
caagcaggaggccgataagctgaagaaggccggcctggtgaatagccagc
agctggacgagctgaagcggcgcctggaggagctgaaggaggaggccagc
aggaaggccagagattacggcagggagttccagctgaagctggagtatgg
cggcggcagcggctccggctctggcggcaagatcgagcagatcctgcaga
agatcgaaaagatcctgcagaagattgagtggattctgcagaagattgaa
cagatcctgcagggg
(SEQ ID NO: 20)
ADPKKVLDKAKDQAENRVRELKQKLEELYKEARKLDLTQEMRRKLELRYI
AAMLMAIGDIYNAIRQAKQEADKLKKAGLVNSQQLDELKRRLEELKEEAS
RKARDYGREFQLKLEYGGGSGSGSGGKIEQILQKIEKILQKIEWILQKIE
QILQG

[0092] Accordingly, in some embodiments, the self-assembling polypeptide encoded by the expressible nucleic acid sequence of the present disclosure comprises at least about 60%, 65%, 70%, 75%, 80%, 85%, 86%, 87%, 88%, 89%, 90%, 91%, 92%, 93%, 94%, 95%, 96%, 97%, 98% or 99% sequence identity to SEQ ID NO: 8, SEQ ID NO: 10, SEQ ID NO: 12, SEQ ID NO: 14, SEQ ID NO: 16, SEQ ID NO: 18 or SEQ ID NO: 20, or a functional fragment or variant thereof. In some embodiments, the self-assembling polypeptide comprises the amino acid sequence of SEQ ID NO: 8, SEQ ID NO: 10, SEQ ID NO: 12, SEQ ID NO: 14, SEQ ID NO: 16, SEQ ID NO: 18 or SEQ ID NO: 20, or a functional fragment or variant thereof. In some embodiments, the nucleic acid sequence encoding the self-assembling polypeptide comprises at least about 60%, 65%, 70%, 75%, 80%, 85%, 86%, 87%, 88%, 89%, 90%, 91%, 92%, 93%, 94%, 95%, 96%, 97%, 98% or 99% sequence identity to SEQ ID NO: 7, SEQ ID NO: 9, SEQ ID NO: 11, SEQ ID NO: 13, SEQ ID NO: 15, SEQ ID NO: 17 or SEQ ID NO: 19, or a functional fragment or variant thereof. In some embodiments, the nucleic acid sequence encoding the self-assembling polypeptide comprises the nucleotide sequence of SEQ ID NO: 7, SEQ ID NO: 9, SEQ ID NO: 11, SEQ ID NO: 13, SEQ ID NO: 15, SEQ ID NO: 17 or SEQ ID NO: 19, or a functional fragment or variant thereof. In other embodiments, the nucleic acid sequence encoding the self-assembling polypeptide comprises at least about 60%, 65%, 70%, 75%, 80%, 85%, 86%, 87%, 88%, 89%, 90%, 91%, 92%, 93%, 94%, 95%, 96%, 97%, 98% or 99% sequence identity to a nucleic acid sequence that is complementary to SEQ ID NO: 7, SEQ ID NO: 9, SEQ ID NO: 11, SEQ ID NO: 13, SEQ ID NO: 15, SEQ ID NO: 17 or SEQ ID NO: 19, or a functional fragment thereof. In some embodiments, the nucleic acid sequence encoding the self-assembling polypeptide comprises a nucleic acid sequence that is complementary to SEQ ID NO: 7, SEQ ID NO: 9, SEQ ID NO: 11, SEQ ID NO: 13, SEQ ID NO: 15, SEQ ID NO: 17 or SEQ ID NO: 19, or a functional fragment thereof.

[0093] In some embodiments, the composition or pharmaceutical composition of the disclosure comprises a vector or a nucleic acid molecule comprising an expressible RNA sequence that encodes a self-assembling polypeptide that is optionally in sequence with one or more additional expressible RNA sequences that encode a viral antigen. In some embodiments, the expressible DNA or RNA sequence that encodes a self-assembling polypeptide is from about 300 to about 500 nucleotides in length. In some embodiments, the expressible DNA or RNA sequence that encodes a self-assembling polypeptide is from about 350 to about 480 nucleotides in length. In some embodiments, the expressible DNA or RNA sequence that encodes a self-assembling polypeptide is from about 350 to about 460 nucleotides in length. In some embodiments, the expressible DNA or RNA sequence that encodes a self-assembling polypeptide is from about 300 to about 500 nucleotides in length. In some embodiments, the expressible DNA or RNA sequence that encodes a self-assembling polypeptide is from about 400 to about 500 nucleotides in length. In some embodiments, the expressible DNA or RNA sequence that encodes a self-assembling polypeptide is from about 390 to about 410 nucleotides in length. In some embodiments, the expressible DNA or RNA sequence that encodes a self-assembling polypeptide is from about 300 to about 410 nucleotides in length. In some embodiments, the expressible DNA or RNA sequence that encodes a self-assembling polypeptide is from about 300 to about 500 nucleotides in length.

[0094] 3. Linker

[0095] The expressible nucleic acid sequence of the present disclosure optionally comprises a nucleic acid sequence encoding a linker peptide, a functional fragment or variant thereof or a pharmaceutically acceptable salt thereof. Any type of linker or linker peptide can be used. The term “linker” or “linker peptide” is used interchangeable herein.

[0096] In some embodiments, each linker or linker peptide is independently selectable from about 0 to about 25, about 1 to about 25, about 2 to about 25, about 3 to about 25, about 4 to about 25, about 5 to about 25, about 6 to about 25, about 7 to about 25, about 8 to about 25, about 9 to about 25, about 10 to about 25, about 11 to about 25, about 12 to about 25, about 13 to about 25, about 14 to about 25, about 15 to about 25, about 16 to about 25, about 17 to about 25, about 18 to about 25, about 19 to about 25, about 20 to about 25, about 21 to about 25, about 22 to about 25, about 23 to about 25, about 24 to about 25 natural or non-natural amino acids in length.

[0097] In some embodiments, each linker or linker peptide is about 0, about 1, about 2, about 3, about 4, about 5, about 6, about 7, about 8, about 9, about 10, about 11, about 12, about 13, about 14, about 15, about 16, about 17, about 18, about 19, about 20, about 21, about 22, about 23, about 24, about 25 natural or non-natural amino acids in length. In some embodiments, each linker or linker peptide is independently selectable from a linker or linker peptide that is about 0, about 1, about 2, about 3, about 4, about 5, about 6, about 7, about 8, about 9, about 10, about 11, about 12, about 13, about 14, about 15, about 16, about 17, about 18, about 19, about 20, about 21, about 22, about 23, about 24, about 25 natural or non-natural amino acids in length. In some embodiments, each linker or linker peptide is about 21 natural or non-natural amino acids in length.

[0098] In some embodiments, the length of each linker or linker peptide is different. For example, in some embodiments, the length of a first linker or linker peptide is about 0, about 1, about 2, about 3, about 4, about 5, about 6, about 7, about 8, about 9, about 10, about 11, about 12, about 13, about 14, about 15, about 16, about 17, about 18, about 19, about 20, about 21, about 22, about 23, about 24, about 25 natural or non-natural amino acids in length, and the length of a second linker is about 0, about 1, about 2, about 3, about 4, about 5, about 6, about 7, about 8, about 9, about 10, about 11, about 12, about 13, about 14, about 15, about 16, about 17, about 18, about 19, about 20, about 21, about 22, about 23, about 24, about 25 natural or non-natural amino acids in length, where the length of the first linker is different from the length of the second linker. Various configurations can be envisioned by the present disclosure, where the linker domain comprises 1, 2, 3, 4, 5, 6, 7, 8, 9, 10 or more linkers or linker peptides wherein the linkers or linker peptides are of similar or different lengths.

[0099] In some embodiments, two linkers or linker peptides can be used together. Accordingly, in some embodiments, the first linker or linker peptide is independently selectable from about 0 to about 25 natural or non-natural amino acids in length, about 0 to about 25, about 1 to about 25, about 2 to about 25, about 3 to about 25, about 4 to about 25, about 5 to about 25, about 6 to about 25, about 7 to about 25, about 8 to about 25, about 9 to about 25, about 10 to about 25, about 11 to about 25, about 12 to about 25, about 13 to about 25, about 14 to about 25, about 15 to about 25, about 16 to about 25, about 17 to about 25, about 18 to about 25, about 19 to about 25, about 20 to about 25, about 21 to about 25, about 22 to about 25, about 23 to about 25, about 24 to about 25 natural or non-natural amino acids in length. In some embodiments, the second linker or linker peptide is independently selectable from about 0 to about 25, about 1 to about 25, about 2 to about 25, about 3 to about 25, about 4 to about 25, about 5 to about 25, about 6 to about 25, about 7 to about 25, about 8 to about 25, about 9 to about 25, about 10 to about 25, about 11 to about 25, about 12 to about 25, about 13 to about 25, about 14 to about 25, about 15 to about 25, about 16 to about 25, about 17 to about 25, about 18 to about 25, about 19 to about 25, about 20 to about 25, about 21 to about 25, about 22 to about 25, about 23 to about 25, about 24 to about 25 natural or non-natural amino acids in length. In some embodiments, the first linker or linker peptide is independently selectable from a linker or linker peptide that is about 0, about 1, about 2, about 3, about 4, about 5, about 6, about 7, about 8, about 9, about 10, about 11, about 12, about 13, about 14, about 15, about 16, about 17, about 18, about 19, about 20, about 21, about 22, about 23, about 24, about 25 natural or non-natural amino acids in length. In some embodiments, the second linker or linker peptide is independently selectable from a linker or linker peptide that is about 0, about 1, about 2, about 3, about 4, about 5, about 6, about 7, about 8, about 9, about 10, about 11, about 12, about 13, about 14, about 15, about 16, about 17, about 18, about 19, about 20, about 21, about 22, about 23, about 24, about 25 natural or non-natural amino acids in length.

[0100] A non-limiting example of a linker peptide may comprise the amino acid sequence of GGSGGSGGSGGSGGG (SEQ ID NO: 22) encoded by the nucleic acid sequence of ggaggctccggaggatctggagggagtggaggctcaggaggaggc (SEQ ID NO: 21).

[0101] A linker or linker peptide can be either flexible or rigid or a combination thereof. An example of a flexible linker is a GGS repeat. In some embodiments, the GGS can be repeated about 1, 2, 3, 4, 5, 6, 7, 8, 9, or 10 times. Non-limiting examples of such linker peptides may comprise the amino acid sequence of GGSGGSGGS (SEQ ID NO: 23), GGSGGSGGSGGS (SEQ ID NO: 24), or GGSGGSGGSGGSGGGGSGGGSGGG (SEQ ID NO: 25). An example of a rigid linker is 4QTL-115 Angstroms, single chain 3-helix bundle represented by the sequence:

(SEQ ID NO: 26)
NEDDMKKLYKQMVQELEKARDRMEKLYKEMVELIQKAIELMRKIFQEVKQEVEKA
IEEMKKLYDEAKKKIEQMIQQIKQGGDKQKMEELLKRAKEEMKKVKDKMEKLLEK
LKQIMQEAKQKMEKLLKQLKEEMKKMKEKMEKLLKEMKQRMEEVKKKMDGDDE
LLEKIKKNIDDLKKIAEDLIKKAEENIKEAKKIAEQLVKRAKQLIEKAKQVAEELIKKI
LQLIEKAKEIAEKVLKGLE.
Other non-limiting examples of linker peptides may be encoded by the nucleic
acid sequence of
(SEQ ID NO: 27)
ggcggctctggcggaagtggcggaagtgggggaagtggaggcggcggaagcgggggaggcagcgggggaggg,
(SEQ ID NO: 28)
ggcggaagcggcggaagcggcgggtct,
(SEQ ID NO: 29)
ggcggcagcggcggcagcggcgggagcggaggaagt,
or
(SEQ ID NO: 30)
ggcggctctggcggaagtggcggaagtgggggaagtggaggcggcggaagcgggggaggcagcgggggaggg.
Additional non-limiting examples of linker peptides include Link 14 linker (SEQ
ID NO: 32) encoded by the nucleic acid sequence of SEQ ID NO: 31;
(SEQ ID NO: 31)
tctcacagcggctccggcggctctggcagcggcggccacgcc
(SEQ ID NO: 32)
SHSGSGGSGSGGHA
CPG9.2 linker 1 (SEQ ID NO: 34) encoded by the nucleic acid sequence of SEQ ID NO: 33;
(SEQ ID NO: 33)
gggggaaatagtagcggc
(SEQ ID NO: 34)
GGNSSG
CPG9.2 linker 2 (SEQ ID NO: 36) encoded by the nucleic acid sequence of SEQ ID NO: 35;
(SEQ ID NO: 35)
ggcggcaacggcagcggcggcggcagcggctccggcggcaacggctctagcggc
(SEQ ID NO: 36)
GGNGSGGGSGSGGNGSSG
PDGFR linker (between tri mer or TSI and PDGFR; SEQ ID NO: 38) encoded by the nucleic
acid sequence of SEQ ID NO: 37;
(SEQ ID NO: 37)
ggaggaggaagcgggggaagcgggggaagcggaggaagcgggggaagcgggggaagc
(SEQ ID NO: 38)
GGGSGGSGGSGGSGGSGGS
Foldon PDGFR linker 1 (SEQ ID NO: 40) encoded by the nucleic acid sequence of SEQ ID
NO: 39;
(SEQ ID NO: 39)
ggaggaggaagcgggggaagcggcggcggc
(SEQ ID NO: 40)
GGGSGGSGGG
Foldon PDGFR linker 2 (SEQ ID NO: 42) encoded by the nucleic acid sequence of SEQ ID
NO: 41;
(SEQ ID NO: 41)
gggggaagcggaggaagcgggggaagcgggggaagc
(SEQ ID NO: 42)
GGSGGSGGSGGS
3BVE linker (SEQ ID NO: 44) encoded by the nucleic acid sequence of SEQ ID NO: 43;
(SEQ ID NO: 43)
ggaagcggc
(SEQ ID NO: 44)
GSG
13_1 linker (SEQ ID NO: 46) encoded by the nucleic acid sequence of SEQ ID NO: 45;
(SEQ ID NO: 45)
ggcggcagcggcagcggcgggagcggagga
(SEQ ID NO: 46)
GGSGSGGSGG
13_2 linker (SEQ ID NO: 48) encoded by the nucleic acid sequence of SEQ ID NO: 47;
(SEQ ID NO: 47)
ggagggagcgatatgagaaaggacgccgagagacggtttgataagttcgtggaggctgctaagaataagtttgacaagtttaaggct
gccctgcggaagggcgacatcaaggaggagaggagaaaggatatgaagaagctggcaaggaaggaggcagagcaggcaagga
gggccgtgaggaacagactgagcgagctgctgtccaagatcaacgacatgcccatcaccaatgatcagaagaagctgatgtctaatg
acgtgctgaagttcgccgcagaagccgaaaagaagattgaagccctggcagcagacgccgaaggaggaagcgggagc
(SEQ ID NO: 48)
GGSDMRKDAERRFDKFVEAAKNKFDKFKAALRKGDIKEERRKDMKKLARKEAEQA
RRAVRNRLSELLSKINDMPITNDQKKLMSNDVLKFAAEAEKKIEALAADAEGGSGS
LS_1 linker (SEQ ID NO: 50) encoded by the nucleic acid sequence of SEQ ID NO: 49;
(SEQ ID NO: 49)
gggggctctagcgggaaaagtctggtggataccgtctatgctctgaaagatgaggtgcaggaactgaggcaggacaacaaaaagat
gaagaagagcctggaggaggagcagagggccagaaaggacctggaaaaactggtgcggaaagtgctgaaaaacatgaatgacg
gagggagtagcggg
(SEQ ID NO: 50)
GGSSGKSLVDTVYALKDEVQELRQDNKKMKKSLEEEQRARKDLEKLVRKVLKNMN
DGGSSG
LS_2 linker (SEQ ID NO: 52) encoded by the nucleic acid sequence of SEQ ID NO: 51;
(SEQ ID NO: 51)
gggggctctagcggggcagacccaaagaaagtgctggataaggcaaaggatcaggcagagaatagagtgagagaactgaaacag
aaactggaggaactgtataaggaggcccggaagctggacctgacccaggagatgaggagaaagctggagctgcgctacatcgccg
ccatgctgatggccatcggcgacatctataacgccatcaggcaggccaagcaggaggccgataagctgaagaaggccggcctggt
gaatagccagcagctggacgagctgaagcggcgcctggaggagctgaaggaggaggcctccaggaaggccagagattatgggc
gggaatttcagctgaaactggagtatggcggcggaagcggaagcgggagcggg
(SEQ ID NO: 52)
GGSSGADPKKVLDKAKDQAENRVRELKQKLEELYKEARKLDLTQEMRRKLELRYIA
AMLMAIGDIYNAIRQAKQEADKLKKAGLVNSQQLDELKRRLEELKEEASRKARDYG
REFQLKLEYGGGSGSGSG
QB_1 linker (SEQ ID NO: 54) encoded by the nucleic acid sequence of SEQ ID NO: 53;
(SEQ ID NO: 53)
ggaggctcttcaggcggcacagacgtgggggcaatcgctggaaaggctaacgaggctggacagggggcttatgatgctcaggtca
aaaacgacgagcaggatgtggagctggccgaccacgaggccaggatcaagcagctgagaatcgatgtggacgatcacgagtctcg
gatcaccgccaacacaaaggccatcacagccctgaatgtgcgcgtgaccacagcagagggagagatcgcatccctgcagaccaac
gtgagcgccctggacggaagggtgaccacagcagagaacaatatctccgccctgcaggcagattacgtgagcggcggcagctccg
gctccgga
(SEQ ID NO: 54)
GGSSGGTDVGAIAGKANEAGQGAYDAQVKNDEQDVELADHEARIKQLRIDVDDHE
SRITANTKAITALNVRVTTAEGEIASLQTNVSALDGRVTTAENNISALQADYVSGGSS
GSG
QB 2 linker (SEQ ID NO: 56) encoded by the nucleic acid sequence of SEQ ID NO: 55;
and
(SEQ ID NO: 55)
ggaggctctggaagcgggggaagtagcggacctcacatgattgctccaggacatcgggacgagtttgaccctaagctgccaacagg
cgagaaagaagaggtgccaggcaagcccggcatcaagaaccctgagacaggcgacgtggtgaggccccctgtggattctgtgaca
aagtacggcccagtgaagggcgacagcatcgtggagaaggaggagatccccttcgagaaggagaggaagtttaaccctgatctgg
ccccaggcaccgagaaggtgacaagagagggccagaagggcgagaagaccatcaccacacccacactgaagaatcctctgaccg
gcgagatcatcagcaagggcgagtccaaggaggagatcacaaaggaccccatcaacgaactgaccgaatggggaccagagacag
gaggaagcggcagcggcggaagcagc
(SEQ ID NO: 56)
GGSGSGGSSGPHMIAPGHRDEFDPKLPTGEKEEVPGKPGIKNPETGDVVRPPVDSVT
KYGPVKGDSIVEKEEIPFEKERKFNPDLAPGTEKVTREGQKGEKTITTPTLKNPLTGEI
ISKGESKEEITKDPINELTEWGPETGGSGSGGSS
IC1/IC2 linker (SEQ ID NO: 58) encoded by the nucleic acid sequence of SEQ ID NO: 57
(SEQ ID NO: 57)
ggaggcagcggcagcggcagcggg
(SEQ ID NO: 58)
GGSGSGSG

[0102] Accordingly, in some embodiments, the linker peptide encoded by the expressible nucleic acid sequence of the present disclosure comprises at least about 60%, 65%, 70%, 75%, 80%, 85%, 86%, 87%, 88%, 89%, 90%, 91%, 92%, 93%, 94%, 95%, 96%, 97%, 98% or 99% sequence identity to SEQ ID NO: 22, SEQ ID NO: 23, SEQ ID NO: 24, SEQ ID NO: 25, SEQ ID NO: 26, SEQ ID NO: 32, SEQ ID NO: 34, SEQ ID NO: 36, SEQ ID NO: 38, SEQ ID NO: 40, SEQ ID NO: 42, SEQ ID NO: 44, SEQ ID NO: 46, SEQ ID NO: 48, SEQ ID NO: 50, SEQ ID NO: 52, SEQ ID NO: 54, SEQ ID NO: 56 or SEQ ID NO: 58, or a functional fragment or variant thereof. In some embodiments, the linker peptide comprises the amino acid sequence of SEQ ID NO: 22, SEQ ID NO: 23, SEQ ID NO: 24, SEQ ID NO: 25, SEQ ID NO: 26, SEQ ID NO: 32, SEQ ID NO: 34, SEQ ID NO: 36, SEQ ID NO: 38, SEQ ID NO: 40, SEQ ID NO: 42, SEQ ID NO: 44, SEQ ID NO: 46, SEQ ID NO: 48, SEQ ID NO: 50, SEQ ID NO: 52, SEQ ID NO: 54, SEQ ID NO: 56 or SEQ ID NO: 58, or a functional fragment or variant thereof. In some embodiments, the nucleic acid sequence encoding the linker peptide comprises at least about 60%, 65%, 70%, 75%, 80%, 85%, 86%, 87%, 88%, 89%, 90%, 91%, 92%, 93%, 94%, 95%, 96%, 97%, 98% or 99% sequence identity to SEQ ID NO: 21, SEQ ID NO: 27, SEQ ID NO: 28, SEQ ID NO: 29, SEQ ID NO: 30, SEQ ID NO: 31, SEQ ID NO: 33, SEQ ID NO: 35, SEQ ID NO: 37, SEQ ID NO: 39, SEQ ID NO: 41, SEQ ID NO: 43, SEQ ID NO: 45, SEQ ID NO: 47, SEQ ID NO: 49, SEQ ID NO: 51, SEQ ID NO: 53, SEQ ID NO: 55 or SEQ ID NO: 57 or a functional fragment or variant thereof. In some embodiments, the nucleic acid sequence encoding the linker peptide comprises the nucleotide sequence of SEQ ID NO: 21, SEQ ID NO: 27, SEQ ID NO: 28, SEQ ID NO: 29, SEQ ID NO: 30, SEQ ID NO: 31, SEQ ID NO: 33, SEQ ID NO: 35, SEQ ID NO: 37, SEQ ID NO: 39, SEQ ID NO: 41, SEQ ID NO: 43, SEQ ID NO: 45, SEQ ID NO: 47, SEQ ID NO: 49, SEQ ID NO: 51, SEQ ID NO: 53, SEQ ID NO: 55 or SEQ ID NO: 57 or a functional fragment or variant thereof. In other embodiments, the nucleic acid sequence encoding the linker peptide comprises at least about 60%, 65%, 70%, 75%, 80%, 85%, 86%, 87%, 88%, 89%, 90%, 91%, 92%, 93%, 94%, 95%, 96%, 97%, 98% or 99% sequence identity to a nucleic acid sequence that is complementary to SEQ ID NO: 21, SEQ ID NO: 27, SEQ ID NO: 28, SEQ ID NO: 29, SEQ ID NO: 30, SEQ ID NO: 31, SEQ ID NO: 33, SEQ ID NO: 35, SEQ ID NO: 37, SEQ ID NO: 39, SEQ ID NO: 41, SEQ ID NO: 43, SEQ ID NO: 45, SEQ ID NO: 47, SEQ ID NO: 49, SEQ ID NO: 51, SEQ ID NO: 53, SEQ ID NO: 55 or SEQ ID NO: 57 or a functional fragment or variant thereof. In some embodiments, the nucleic acid sequence encoding the linker peptide comprises a nucleic acid sequence that is complementary to the nucleotide sequence of SEQ ID NO: 21, SEQ ID NO: 27, SEQ ID NO: 28, SEQ ID NO: 29, SEQ ID NO: 30, SEQ ID NO: 31, SEQ ID NO: 33, SEQ ID NO: 35, SEQ ID NO: 37, SEQ ID NO: 39, SEQ ID NO: 41, SEQ ID NO: 43, SEQ ID NO: 45, SEQ ID NO: 47, SEQ ID NO: 49, SEQ ID NO: 51, SEQ ID NO: 53, SEQ ID NO: 55 or SEQ ID NO: 57 or a functional fragment or variant thereof

[0103] 4. Viral Antigens

[0104] The expressible nucleic acid sequence of the present disclosure comprises a nucleic acid sequence encoding an antigen domain comprising a viral antigen, a functional fragment or variant thereof or a pharmaceutically acceptable salt thereof. In some embodiments, the viral antigen comprises an antigen from a virus from the family of Coronaviridae. In some embodiments, the viral antigen comprises an antigen from a coronavirus. In some embodiments, the viral antigen comprises an antigen from SARS-CoV. In some embodiments, the viral antigen comprises an antigen from SARS-CoV-2. In some embodiments, the viral antigen comprises the spike protein of SARS-CoV-2, a functional fragment or variant thereof or a pharmaceutically acceptable salt thereof. In some embodiments, the viral antigen comprises a viral trimer polypeptide, a functional fragment or variant thereof or a pharmaceutically acceptable salt thereof. In some embodiments, the viral trimer comprises a trimer from a virus from the family of Coronaviridae. In some embodiments, the viral trimer comprises a trimer from a coronavirus. In some embodiments, the viral trimer comprises a trimer from SARS-CoV. In some embodiments, the viral trimer comprises a trimer from SARS-CoV-2. In some embodiments, the viral trimer comprises the spike protein of SARS-CoV-2, a functional fragment or variant thereof or a pharmaceutically acceptable salt thereof.

[0105] A non-limiting example of a viral antigen is a fragment of the surface glycoprotein (or spike protein or S protein) of SARS-CoV-2 having the amino acid sequence of SEQ ID NO: 60 encoded by the nucleic acid sequence of SEQ ID NO: 59 (GenBank Accession No. QHD43416).

(SEQ ID NO: 59)
atgtttgtttttcttgttttattgccactagtctctagtcagtgtgttaatcttacaaccagaactcaattaccccctgcatacactaattctttcac
acgtggtgtttattaccctgacaaagttttcagatcctcagttttacattcaactcaggacttgttcttacctttcttttccaatgttacttggttcc
atgctatacatgtctctgggaccaatggtactaagaggtttgataaccctgtcctaccatttaatgatggtgtttattttgcttccactgagaa
gtctaacataataagaggctggatttttggtactactttagattcgaagacccagtccctacttattgttaataacgctactaatgttgttatta
aagtctgtgaatttcaattttgtaatgatccatttttgggtgtttattaccacaaaaacaacaaaagttggatggaaagtgagttcagagtttat
tctagtgcgaataattgcacttttgaatatgtctctcagccttttcttatggaccttgaaggaaaacagggtaatttcaaaaatcttagggaat
ttgtgtttaagaatattgatggttattttaaaatatattctaagcacacgcctattaatttagtgcgtgatctccctcagggtttttcggctttaga
accattggtagatttgccaataggtattaacatcactaggtttcaaactttacttgctttacatagaagttatttgactcctggtgattcttcttca
ggttggacagctggtgctgcagcttattatgtgggttatcttcaacctaggacttttctattaaaatataatgaaaatggaaccattacagat
gctgtagactgtgcacttgaccctctctcagaaacaaagtgtacgttgaaatccttcactgtagaaaaaggaatctatcaaacttctaactt
tagagtccaaccaacagaatctattgttagatttcctaatattacaaacttgtgcccttttggtgaagtttttaacgccaccagatttgcatctg
tttatgcttggaacaggaagagaatcagcaactgtgttgctgattattctgtcctatataattccgcatcattttccacttttaagtgttatgga
gtgtctcctactaaattaaatgatctctgctttactaatgtctatgcagattcatttgtaattagaggtgatgaagtcagacaaatcgctccag
ggcaaactggaaagattgctgattataattataaattaccagatgattttacaggctgcgttatagcttggaattctaacaatcttgattctaa
ggttggtggtaattataattacctgtatagattgtttaggaagtctaatctcaaaccttttgagagagatatttcaactgaaatctatcaggcc
ggtagcacaccttgtaatggtgttgaaggttttaattgttactttcctttacaatcatatggtttccaacccactaatggtgttggttaccaacc
atacagagtagtagtactttcttttgaacttctacatgcaccagcaactgtttgtggacctaaaaagtctactaatttggttaaaaacaaatgt
gtcaatttcaacttcaatggtttaacaggcacaggtgttcttactgagtctaacaaaaagtttctgcctttccaacaatttggcagagacatt
gctgacactactgatgctgtccgtgatccacagacacttgagattcttgacattacaccatgttcttttggtggtgtcagtgttataacacca
ggaacaaatacttctaaccaggttgctgttctttatcaggatgttaactgcacagaagtccctgttgctattcatgcagatcaacttactcct
acttggcgtgtttattctacaggttctaatgtttttcaaacacgtgcaggctgtttaataggggctgaacatgtcaacaactcatatgagtgt
gacatacccattggtgcaggtatatgcgctagttatcagactcagactaattctcctcggcgggcacgtagtgtagctagtcaatccatca
ttgcctacactatgtcacttggtgcagaaaattcagttgcttactctaataactctattgccatacccacaaattttactattagtgttaccaca
gaaattctaccagtgtctatgaccaagacatcagtagattgtacaatgtacatttgtggtgattcaactgaatgcagcaatcttttgttgcaat
atggcagtttttgtacacaattaaaccgtgctttaactggaatagctgttgaacaagacaaaaacacccaagaagtttttgcacaagtcaa
acaaatttacaaaacaccaccaattaaagattttggtggttttaatttttcacaaatattaccagatccatcaaaaccaagcaagaggtcatt
tattgaagatctacttttcaacaaagtgacacttgcagatgctggcttcatcaaacaatatggtgattgccttggtgatattgctgctagaga
cctcatttgtgcacaaaagtttaacggccttactgttttgccacctttgctcacagatgaaatgattgctcaatacacttctgcactgttagcg
ggtacaatcacttctggttggacctttggtgcaggtgctgcattacaaataccatttgctatgcaaatggcttataggtttaatggtattgga
gttacacagaatgttctctatgagaaccaaaaattgattgccaaccaatttaatagtgctattggcaaaattcaagactcactttcttccaca
gcaagtgcacttggaaaacttcaagatgtggtcaaccaaaatgcacaagctttaaacacgcttgttaaacaacttagctccaattttggtg
caatttcaagtgttttaaatgatatcctttcacgtcttgacaaagttgaggctgaagtgcaaattgataggttgatcacaggcagacttcaaa
gtttgcagacatatgtgactcaacaattaattagagctgcagaaatcagagcttctgctaatcttgctgctactaaaatgtcagagtgtgta
cttggacaatcaaaaagagttgatttttgtggaaagggctatcatcttatgtccttccctcagtcagcacctcatggtgtagtcttcttgcatg
tgacttatgtccctgcacaagaaaagaacttcacaactgctcctgccatttgtcatgatggaaaagcacactttcctcgtgaaggtgtcttt
gtttcaaatggcacacactggtttgtaacacaaaggaatttttatgaaccacaaatcattactacagacaacacatttgtgtctggtaactgt
gatgttgtaataggaattgtcaacaacacagtttatgatcctttgcaacctgaattagactcattcaaggaggagttagataaatattttaag
aatcatacatcaccagatgttgatttaggtgacatctctggcattaatgcttcagttgtaaacattcaaaaagaaattgaccgcctcaatga
ggttgccaagaatttaaatgaatctctcatcgatctccaagaacttggaaagtatgagcagtatataaaatggccatggtacatttggcta
ggttttatagctggcttgattgccatagtaatggtgacaattatgctttgctgtatgaccagttgctgtagttgtctcaagggctgttgttcttgt
ggatcctgctgcaaatttgatgaagacgactctgagccagtgctcaaaggagtcaaattacattacacataa
(SEQ ID NO: 60)
MFVFLVLLPLVSSQCVNLTTRTQLPPAYTNSFTRGVYYPDKVFRSSVLHSTQDLFLPF
FSNVTWFHAIHVSGTNGTKRFDNPVLPFNDGVYFASTEKSNIIRGWIFGTTLDSKTQS
LLIVNNATNVVIKVCEFQFCNDPFLGVYYHKNNKSWMESEFRVYSSANNCTFEYVS
QPFLMDLEGKQGNFKNLREFVFKNIDGYFKIYSKHTPINLVRDLPQGFSALEPLVDLPI
GINITRFQTLLALHRSYLTPGDSSSGWTAGAAAYYVGYLQPRTFLLKYNENGTITDA
VDCALDPLSETKCTLKSFTVEKGIYQTSNFRVQPTESIVRFPNITNLCPFGEVFNATRF
ASVYAWNRKRISNCVADYSVLYNSASFSTFKCYGVSPTKLNDLCFTNVYADSFVIRG
DEVRQIAPGQTGKIADYNYKLPDDFTGCVIAWNSNNLDSKVGGNYNYLYRLFRKSN
LKPFERDISTEIYQAGSTPCNGVEGFNCYFPLQSYGFQPTNGVGYQPYRVVVLSFELL
HAPATVCGPKKSTNLVKNKCVNFNFNGLTGTGVLTESNKKFLPFQQFGRDIADTTDA
VRDPQTLEILDITPCSFGGVSVITPGTNTSNQVAVLYQDVNCTEVPVAIHADQLTPTW
RVYSTGSNVFQTRAGCLIGAEHVNNSYECDIPIGAGICASYQTQTNSPRRARSVASQSI
IAYTMSLGAENSVAYSNNSIAIPTNFTISVTTEILPVSMTKTSVDCTMYICGDSTECSN
LLLQYGSFCTQLNRALTGIAVEQDKNTQEVFAQVKQIYKTPPIKDFGGFNFSQILPDPS
KPSKRSFIEDLLFNKVTLADAGFIKQYGDCLGDIAARDLICAQKFNGLTVLPPLLTDE
MIAQYTSALLAGTITSGWTFGAGAALQIPFAMQMAYRFNGIGVTQNVLYENQKLIA
NQFNSAIGKIQDSLSSTASALGKLQDVVNQNAQALNTLVKQLSSNFGAISSVLNDILS
RLDKVEAEVQIDRLITGRLQSLQTYVTQQLIRAAEIRASANLAATKMSECVLGQSKR
VDFCGKGYHLMSFPQSAPHGVVFLHVTYVPAQEKNFTTAPAICHDGKAHFPREGVF
VSNGTHWFVTQRNFYEPQIITTDNTFVSGNCDVVIGIVNNTVYDPLQPELDSFKEELD
KYFKNHTSPDVDLGDISGINASVVNIQKEIDRLNEVAKNLNESLIDLQELGKYEQYIK
WPWYIWLGFIAGLIAIVMVTIMLCCMTSCCSCLKGCCSCGSCCKFDEDDSEPVLKGV
KLHYT

[0106] Non-limiting examples of fragments of the S protein of SARS-CoV-2 comprises the following sequences:

(SEQ ID NO: 171)
MFVFLVLLPLVSSQCVNLTTRTQLPPAYTNSFTRGVYYPDKVFRSSVLHSTQDLFLPF
FSNVTWFHAIHVSGTNGTKRFDNPVLPFNDGVYFASTEKSNIIRGWIFGTTLDSKTQS
LLIVNNATNVVIKVCEFQFCNDPFLGVYYHKNNKSWMESEFRVYSSANNCTFEYVS
QPFLMDLEGKQGNFKNLREFVFKNIDGYFKIYSKHTPINLVRDLPQGFSALEPLVDLPI
GINITRFQTLLALHRSYLTPGDSSSGWTAGAAAYYVGYLQPRTFLLKYNENGTITDA
VDCALDPLSETKCTLKSFTVEKGIYQTSNFRVQPTESIVRFPNITNLCPFGEVFNATRF
ASVYAWNRKRISNCVADYSVLYNSASFSTFKCYGVSPTKLNDLCFTNVYADSFVIRG
DEVRQIAPGQTGKIADYNYKLPDDFTGCVIAWNSNNLDSKVGGNYNYLYRLFRKSN
LKPFERDISTEIYQAGSTPCNGVEGFNCYFPLQSYGFQPTNGVGYQPYRVVVLSFELL
HAPATVCGPKKSTNLVKNKCVNFNFNGLTGTGVLTESNKKFLPFQQFGRDIADTTDA
VRDPQTLEILDITPCSFGGVSVITPGTNTSNQVAVLYQDVNCTEVPVAIHADQLTPTW
RVYSTGSNVFQTRAGCLIGAEHVNNSYECDIPIGAGICASYQTQTNSPRRARSVASQSI
IAYTMSLGAENSVAYSNNSIAIPTNFTISVTTEILPVSMTKTSVDCTMYICGDSTECSN
LLLQYGSFCTQLNRALTGIAVEQDKNTQEVFAQVKQIYKTPPIKDFGGFNFSQILPDPS
KPSKRSFIEDLLFNKVTLADAGFIKQYGDCLGDIAARDLICAQKFNGLTVLPPLLTDE
MIAQYTSALLAGTITSGWTFGAGAALQIPFAMQMAYRFNGIGVTQNVLYENQKLIA
NQFNSAIGKIQDSLSSTASALGKLQDVVNQNAQALNTLVKQLSSNFGAISSVLNDILS
RLDKVEAEVQIDRLITGRLQSLQTYVTQQLIRAAEIRASANLAATKMSECVLGQSKR
VDFCGKGYHLMSFPQSAPHGVVFLHVTYVPAQEKNFTTAPAICHDGKAHFPREGVF
VSNGTHWFVTQRNFYEPQIITTDNTFVSGNCDVVIGIVNNTVYDPLQPELDSFKEELD
KYFKNHTSPDVDLGDISGINASVVNIQKEIDRLNEVAKNLNESLIDLQELGKYEQYIK
WPW
(SEQ ID NO: 172)
MFVFLVLLPLVSSQCVNLTTRTQLPPAYTNSFTRGVYYPDKVFRSSVLHSTQDLFLPF
FSNVTWFHAIHVSGTNGTKRFDNPVLPFNDGVYFASTEKSNIIRGWIFGTTLDSKTQS
LLIVNNATNVVIKVCEFQFCNDPFLGVYYHKNNKSWMESEFRVYSSANNCTFEYVS
QPFLMDLEGKQGNFKNLREFVFKNIDGYFKIYSKHTPINLVRDLPQGFSALEPLVDLPI
GINITRFQTLLALHRSYLTPGDSSSGWTAGAAAYYVGYLQPRTFLLKYNENGTITDA
VDCALDPLSETKCTLKSFTVEKGIYQTSNFRVQPTESIVRFPNITNLCPFGEVFNATRF
ASVYAWNRKRISNCVADYSVLYNSASFSTFKCYGVSPTKLNDLCFTNVYADSFVIRG
DEVRQIAPGQTGKIADYNYKLPDDFTGCVIAWNSNNLDSKVGGNYNYLYRLFRKSN
LKPFERDISTEIYQAGSTPCNGVEGFNCYFPLQSYGFQPTNGVGYQPYRVVVLSFELL
HAPATVCGPKKSTNLVKNKCVNFNFNGLTGTGVLTESNKKFLPFQQFGRDIADTTDA
VRDPQTLEILDITPCSFGGVSVITPGTNTSNQVAVLYQDVNCTEVPVAIHADQLTPTW
RVYSTGSNVFQTRAGCLIGAEHVNNSYECDIPIGAGICASYQTQTNSPRRARSVASQSI
IAYTMSLGAENSVAYSNNSIAIPTNFTISVTTEILPVSMTKTSVDCTMYICGDSTECSN
LLLQYGSFCTQLNRALTGIAVEQDKNTQEVFAQVKQIYKTPPIKDFGGFNFSQILPDPS
KPSKRSFIEDLLFNKVTLADAGFIKQYGDCLGDIAARDLICAQKFNGLTVLPPLLTDE
MIAQYTSALLAGTITSGWTFGAGAALQIPFAMQMAYRFNGIGVTQNVLYENQKLIA
NQFNSAIGKIQDSLSSTASALGKLQDVVNQNAQALNTLVKQLSSNFGAISSVLNDILS
RLDKVEAEVQIDRLITGRLQSLQTYVTQQLIRAAEIRASANLAATKMSECVLGQSKR
VDFCGKGYHLMSFPQSAPHGVVFLHVTYVPAQEKNFTTAPAICHDGKAHFPREGVF
VSNGTHWFVTQRNFYEPQIITTDNTFVSGNCDVVIGIVNNTVYDPLQPELDSFKEELD
KYFKNHTSPDVDLGDISGINASVVNIQKEIDRLNEVAKNLNESLIDLQELGKYEQYIK
WP
(SEQ ID NO: 173)
MFVFLVLLPLVSSQCVNLTTRTQLPPAYTNSFTRGVYYPDKVFRSSVLHSTQDLFLPF
FSNVTWFHAIHVSGTNGTKRFDNPVLPFNDGVYFASTEKSNIIRGWIFGTTLDSKTQS
LLIVNNATNVVIKVCEFQFCNDPFLGVYYHKNNKSWMESEFRVYSSANNCTFEYVS
QPFLMDLEGKQGNFKNLREFVFKNIDGYFKIYSKHTPINLVRDLPQGFSALEPLVDLPI
GINITRFQTLLALHRSYLTPGDSSSGWTAGAAAYYVGYLQPRTFLLKYNENGTITDA
VDCALDPLSETKCTLKSFTVEKGIYQTSNFRVQPTESIVRFPNITNLCPFGEVFNATRF
ASVYAWNRKRISNCVADYSVLYNSASFSTFKCYGVSPTKLNDLCFTNVYADSFVIRG
DEVRQIAPGQTGKIADYNYKLPDDFTGCVIAWNSNNLDSKVGGNYNYLYRLFRKSN
LKPFERDISTEIYQAGSTPCNGVEGFNCYFPLQSYGFQPTNGVGYQPYRVVVLSFELL
HAPATVCGPKKSTNLVKNKCVNFNFNGLTGTGVLTESNKKFLPFQQFGRDIADTTDA
VRDPQTLEILDITPCSFGGVSVITPGTNTSNQVAVLYQDVNCTEVPVAIHADQLTPTW
RVYSTGSNVFQTRAGCLIGAEHVNNSYECDIPIGAGICASYQTQTNSPRRARSVASQSI
IAYTMSLGAENSVAYSNNSIAIPTNFTISVTTEILPVSMTKTSVDCTMYICGDSTECSN
LLLQYGSFCTQLNRALTGIAVEQDKNTQEVFAQVKQIYKTPPIKDFGGFNFSQILPDPS
KPSKRSFIEDLLFNKVTLADAGFIKQYGDCLGDIAARDLICAQKFNGLTVLPPLLTDE
MIAQYTSALLAGTITSGWTFGAGAALQIPFAMQMAYRFNGIGVTQNVLYENQKLIA
NQFNSAIGKIQDSLSSTASALGKLQDVVNQNAQALNTLVKQLSSNFGAISSVLNDILS
RLDKVEAEVQIDRLITGRLQSLQTYVTQQLIRAAEIRASANLAATKMSECVLGQSKR
VDFCGKGYHLMSFPQSAPHGVVFLHVTYVPAQEKNFTTAPAICHDGKAHFPREGVF
VSNGTHWFVTQRNFYEPQIITTDNTFVSGNCDVVIGIVNNTVYDPLQPELDSFKEELD
KYFKNHTSPDVDLGDISGINASVVNIQKEIDRLNEVAKNLNESLIDLQELGKYEQ
(SEQ ID NO: 174)
SQCVNLTTRTQLPPAYTNSFTRGVYYPDKVFRSSVLHSTQDLFLPFFSNVTWFHAIHV
SGTNGTKRFDNPVLPFNDGVYFASTEKSNIIRGWIFGTTLDSKTQSLLIVNNATNVVIK
VCEFQFCNDPFLGVYYHKNNKSWMESEFRVYSSANNCTFEYVSQPFLMDLEGKQGN
FKNLREFVFKNIDGYFKIYSKHTPINLVRDLPQGFSALEPLVDLPIGINITRFQTLLALH
RSYLTPGDSSSGWTAGAAAYYVGYLQPRTFLLKYNENGTITDAVDCALDPLSETKCT
LKSFTVEKGIYQTSNFRVQPTESIVRFPNITNLCPFGEVFNATRFASVYAWNRKRISNC
VADYSVLYNSASFSTFKCYGVSPTKLNDLCFTNVYADSFVIRGDEVRQIAPGQTGKIA
DYNYKLPDDFTGCVIAWNSNNLDSKVGGNYNYLYRLFRKSNLKPFERDISTEIYQAG
STPCNGVEGFNCYFPLQSYGFQPTNGVGYQPYRVVVLSFELLHAPATVCGPKKSTNL
VKNKCVNFNFNGLTGTGVLTESNKKFLPFQQFGRDIADTTDAVRDPQTLEILDITPCS
FGGVSVITPGTNTSNQVAVLYQDVNCTEVPVAIHADQLTPTWRVYSTGSNVFQTRA
GCLIGAEHVNNSYECDIPIGAGICASYQTQTNSPRRARSVASQSIIAYTMSLGAENSVA
YSNNSIAIPTNFTISVTTEILPVSMTKTSVDCTMYICGDSTECSNLLLQYGSFCTQLNR
ALTGIAVEQDKNTQEVFAQVKQIYKTPPIKDFGGFNFSQILPDPSKPSKRSFIEDLLFN
KVTLADAGFIKQYGDCLGDIAARDLICAQKFNGLTVLPPLLTDEMIAQYTSALLAGTI
TSGWTFGAGAALQIPFAMQMAYRFNGIGVTQNVLYENQKLIANQFNSAIGKIQDSLS
STASALGKLQDVVNQNAQALNTLVKQLSSNFGAISSVLNDILSRLDKVEAEVQIDRLI
TGRLQSLQTYVTQQLIRAAEIRASANLAATKMSECVLGQSKRVDFCGKGYHLMSFP
QSAPHGVVFLHVTYVPAQEKNFTTAPAICHDGKAHFPREGVFVSNGTHWFVTQRNF
YEPQIITTDNTFVSGNCDVVIGIVNNTVYDPLQPELDSFKEELDKYFKNHTSPDVDLG
DISGINASVVNIQKEIDRLNEVAKNLNESLIDLQELGKYEQ
(SEQ ID NO: 175)
NLCPFGEVFNATRFASVYAWNRKRISNCVADYSVLYNSASFSTFKCYGVSPTKLNDL
CFTNVYADSFVIRGDEVRQIAPGQTGKIADYNYKLPDDFTGCVIAWNSNNLDSKVGG
NYNYLYRLFRKSNLKPFERDIST
(SEQ ID NO: 176)
SFIEDLLFNKVTLADAGFIKQYGDCLGDIAARDLICAQKF
(SEQ ID NO: 177)
PSKRSFIEDLLFNKV

[0107] A further non-limiting example of a viral antigen is a fragment of the envelop protein (or E protein) of SARS-CoV-2 having the amino acid sequence of SEQ ID NO: 62 encoded by the nucleic acid sequence of SEQ ID NO: 61 (GenBank Accession No. QHD43418).

(SEQ ID NO: 61)
atgtactcattcgtttcggaagagacaggtacgttaatagttaatagcgt
acttctttttcttgctttcgtggtattcttgctagttacactagccatcc
ttactgcgcttcgattgtgtgcgtactgctgcaatattgttaacgtgagt
cttgtaaaaccttctttttacgtttactctcgtgttaaaaatctgaattc
ttctagagttcctgatcttctggtctaa
(SEQ ID NO: 62)
MYSFVSEETGTLIVNSVLLFLAFVVFLLVTLAILTALRLCAYCCNIVNVS
LVKPSFYVYSRVKNLNSSRVPDLLV

[0108] Another non-limiting example of a viral antigen is a fragment of the membrane glycoprotein (or M protein) of SARS-CoV-2 having the amino acid sequence of SEQ ID NO: 64 encoded by the nucleic acid sequence of SEQ ID NO: 63 (GenBank Accession No. QHD43419).

(SEQ ID NO: 63)
ccatggcagattccaacggtactattaccgttgaagagcttaaaaagctc
cttgaacaatggaacctagtaataggtttcctattccttacatggatttg
tcttctacaatttgcctatgccaacaggaataggtttttgtatataatta
agttaattttcctctggctgttatggccagtaactttagcttgttttgtg
cttgctgctgtttacagaataaattggatcaccggtggaattgctatcgc
aatggcttgtcttgtaggcttgatgtggctcagctacttcattgcttctt
tcagactgtttgcgcgtacgcgttccatgtggtcattcaatccagaaact
aacattcttctcaacgtgccactccatggcactattctgaccagaccgct
tctagaaagtgaactcgtaatcggagctgtgatccttcgtggacatcttc
gtattgctggacaccatctaggacgctgtgacatcaaggacctgcctaaa
gaaatcactgttgctacatcacgaacgctttcttattacaaattgggagc
ttcgcagcgtgtagcaggtgactcaggttttgctgcatacagtcgctaca
ggattggcaactataaattaaacacagaccattccagtagcagtgacaat
attgctttgcttgtacagtaa
(SEQ ID NO: 64)
MADSNGTITVEELKKLLEQWNLVIGFLFLTWICLLQFAYANRNRFLYIIK
LIFLWLLWPVTLACFVLAAVYRINWITGGIAIAMACLVGLMWLSYFIASF
RLFARTRSMWSFNPETNILLNVPLHGTILTRPLLESELVIGAVILRGHLR
IAGHHLGRCDIKDLPKEITVATSRTLSYYKLGASQRVAGDSGFAAYSRYR
IGNYKLNTDHSSSSDNIALLVQ

[0109] A yet another non-limiting example of a viral antigen is a fragment of the nucleocapsid phosphoprotein (or N protein) of SARS-CoV-2 having the amino acid sequence of SEQ ID NO: 66 encoded by the nucleic acid sequence of SEQ ID NO: 65 (GenBank Accession No. QHD43423).

(SEQ ID NO: 65)
atgtctgataatggaccccaaaatcagcgaaatgcaccccgcattacgtt
tggtggaccctcagattcaactggcagtaaccagaatggagaacgcagtg
gggcgcgatcaaaacaacgtcggccccaaggtttacccaataatactgcg
tcttggttcaccgctctcactcaacatggcaaggaagaccttaaattccc
tcgaggacaaggcgttccaattaacaccaatagcagtccagatgaccaaa
ttggctactaccgaagagctaccagacgaattcgtggtggtgacggtaaa
atgaaagatctcagtccaagatggtatttctactacctaggaactgggcc
agaagctggacttccctatggtgctaacaaagacggcatcatatgggttg
caactgagggagccttgaatacaccaaaagatcacattggcacccgcaat
cctgctaacaatgctgcaatcgtgctacaacttcctcaaggaacaacatt
gccaaaaggcttctacgcagaagggagcagaggcggcagtcaagcctctt
ctcgttcctcatcacgtagtcgcaacagttcaagaaattcaactccaggc
agcagtaggggaacttctcctgctagaatggctggcaatggcggtgatgc
tgctcttgctttgctgctgcttgacagattgaaccagcttgagagcaaaa
tgtctggtaaaggccaacaacaacaaggccaaactgtcactaagaaatct
gctgctgaggcttctaagaagcctcggcaaaaacgtactgccactaaagc
atacaatgtaacacaagctttcggcagacgtggtccagaacaaacccaag
gaaattttggggaccaggaactaatcagacaaggaactgattacaaacat
tggccgcaaattgcacaatttgcccccagcgcttcagcgttcttcggaat
gtcgcgcattggcatggaagtcacaccttcgggaacgtggttgacctaca
caggtgccatcaaattggatgacaaagatccaaatttcaaagatcaagtc
attttgctgaataagcatattgacgcatacaaaacattcccaccaacaga
gcctaaaaaggacaaaaagaagaaggctgatgaaactcaagccttaccgc
agagacagaagaaacagcaaactgtgactcttcttcctgctgcagatttg
gatgatttctccaaacaattgcaacaatccatgagcagtgctgactcaac
tcaggcctaa
(SEQ ID NO: 66)
MSDNGPQNQRNAPRITFGGPSDSTGSNQNGERSGARSKQRRPQGLPNNTA
SWFTALTQHGKEDLKFPRGQGVPINTNSSPDDQIGYYRRATRRIRGGDGK
MKDLSPRWYFYYLGTGPEAGLPYGANKDGIIWVATEGALNTPKDHIGTRN
PANNAAIVLQLPQGTTLPKGFYAEGSRGGSQASSRSSSRSRNSSRNSTPG
SSRGTSPARMAGNGGDAALALLLLDRLNQLESKMSGKGQQQQGQTVTKKS
AAEASKKPRQKRTATKAYNVTQAFGRRGPEQTQGNFGDQELIRQGTDYKH
WPQIAQFAPSASAFFGMSRIGMEVTPSGTWLTYTGAIKLDDKDPNFKDQV
ILLNKHIDAYKTFPPTEPKKDKKKKADETQALPQRQKKQQTVTLLPAADL
DDFSKQLQQSMSSADSTQA

[0110] Accordingly, in some embodiments, the viral antigen encoded by the expressible nucleic acid sequence of the present disclosure comprises at least about 60%, 65%, 70%, 75%, 80%, 85%, 86%, 87%, 88%, 89%, 90%, 91%, 92%, 93%, 94%, 95%, 96%, 97%, 98% or 99% sequence identity to SEQ ID NO: 60, SEQ ID NO: 62, SEQ ID NO: 64, SEQ ID NO: 66, SEQ ID NO: 171, SEQ ID NO: 172, SEQ ID NO: 173, SEQ ID NO: 174, SEQ ID NO: 175, SEQ ID NO: 176 or SEQ ID NO: 177, or a functional fragment or variant thereof or a pharmaceutically acceptable salt thereof. In some embodiments, the viral antigen comprises the amino acid sequence of SEQ ID NO: 60, SEQ ID NO: 62, SEQ ID NO: 64, SEQ ID NO: 66, SEQ ID NO: 171, SEQ ID NO: 172, SEQ ID NO: 173, SEQ ID NO: 174, SEQ ID NO: 175, SEQ ID NO: 176 or SEQ ID NO: 177, or a functional fragment or variant thereof or a pharmaceutically acceptable salt thereof. In some embodiments, the nucleic acid sequence encoding the viral antigen comprises at least about 60%, 65%, 70%, 75%, 80%, 85%, 86%, 87%, 88%, 89%, 90%, 91%, 92%, 93%, 94%, 95%, 96%, 97%, 98% or 99% sequence identity to SEQ ID NO: 59, SEQ ID NO: 61, SEQ ID NO: 63 or SEQ ID NO: 65, or a functional fragment or variant thereof or a pharmaceutically acceptable salt thereof. In some embodiments, the nucleic acid sequence encoding the viral antigen comprises the nucleotide sequence of SEQ ID NO: 59, SEQ ID NO: 61, SEQ ID NO: 63 or SEQ ID NO: 65, or a functional fragment or variant thereof or a pharmaceutically acceptable salt thereof. In some embodiments, the nucleic acid sequence encoding the viral antigen comprises at least about 60%, 65%, 70%, 75%, 80%, 85%, 86%, 87%, 88%, 89%, 90%, 91%, 92%, 93%, 94%, 95%, 96%, 97%, 98% or 99% sequence identity to a nucleic acid sequence that is complementary to SEQ ID NO: 59, SEQ ID NO: 61, SEQ ID NO: 63 or SEQ ID NO: 65, or a functional fragment or variant thereof or a pharmaceutically acceptable salt thereof. In some embodiments, the nucleic acid sequence encoding the viral antigen comprises a nucleic acid sequence that is complementary to the nucleotide sequence of SEQ ID NO: 59, SEQ ID NO: 61, SEQ ID NO: 63 or SEQ ID NO: 65, or a functional fragment or variant thereof or a pharmaceutically acceptable salt thereof.

[0111] In some embodiments, the composition or pharmaceutical composition of the disclosure comprises an expressible DNA or RNA sequence that encodes a viral antigen and is from about 1100 to about 1300 nucletides in length. In some embodiments, the composition or pharmaceutical composition of the disclosure comprises an expressible DNA or RNA sequence that encodes a viral antigen and is from about 1100 to about 1200 nucletides in length. In some embodiments, the composition or pharmaceutical composition of the disclosure comprises an expressible DNA or RNA sequence that encodes a viral antigen and is from about 1100 to about 1300 nucletides in length. In some embodiments, the composition or pharmaceutical composition of the disclosure comprises an expressible DNA or RNA sequence that encodes a viral antigen and is from about 1200 to about 1210 nucletides in length. In some embodiments, the composition or pharmaceutical composition of the disclosure comprises an expressible DNA or RNA sequence that encodes a viral antigen and is from about 1180 to about 1220 nucletides in length. In some embodiments, the composition or pharmaceutical composition of the disclosure comprises an expressible DNA or RNA sequence that encodes a viral antigen and is from about 1180 to about 1215 nucletides in length. In some embodiments, the composition or pharmaceutical composition of the disclosure comprises an expressible DNA or RNA sequence that encodes a viral antigen and is from about 1180 to about 1210 nucletides in length. In some embodiments, the composition or pharmaceutical composition of the disclosure comprises an expressible DNA or RNA sequence that encodes a viral antigen and is from about 1180 to about 1200 nucletides in length. In some embodiments, the composition or pharmaceutical composition of the disclosure comprises an expressible DNA or RNA sequence that encodes a viral antigen and is from about 1220 to about 1230 nucletides in length. In some embodiments, the composition or pharmaceutical composition of the disclosure comprises an expressible DNA or RNA sequence that encodes a viral antigen and is from about 1100 to about 1300 nucletides in length. In some embodiments, the composition or pharmaceutical composition of the disclosure comprises an expressible DNA or RNA sequence that encodes a viral antigen and is from about 1100 to about 1300 nucletides in length.

[0112] In some embodiments, the expressible nucleic acid sequence encodes a fusion protein comprising one or a plurality of coronaviral envelope polypeptides or functional fragments thereof. In some embodiments, the fusion protein comprise a furin cleavage site. In some embodiments, the expressible nucleic acid sequence comprises a first nucleic acid sequence encoding, in a 5′ to 3′ orientation, at least three monomers of coronaviral envelope proteins. In some embodiments, the at least three monomers of coronaviral envelope proteins are separated by a furin cleavage site. In some embodiments, the furin cleavage site comprises at least about 60%, 65%, 70%, 75%, 80%, 85%, 86%, 87%, 88%, 89%, 90%, 91%, 92%, 93%, 94%, 95%, 96%, 97%, 98% or 99% sequence identity to RRRRRR (SEQ ID NO: 67), or a functional fragment or variant thereof or a pharmaceutically acceptable salt thereof. In some embodiments, the furin cleavage site comprises the amino acid sequence of SEQ ID NO: 67, or a functional fragment or variant thereof or a pharmaceutically acceptable salt thereof. In some embodiments, the expressible nucleic acid sequence encodes a polypeptide free of carbohydrate proximate to at least 30 amino acids from the carboxy end of the polypeptide. In some embodiments, the expressible nucleic acid sequence encodes a polypeptide free of carbohydrate proximate to at least 20 amino acids from the carboxy end of the polypeptide. In some embodiments, the expressible nucleic acid sequence encodes a polypeptide free of carbohydrate proximate to at least 10 amino acids from the carboxy end of the polypeptide. In some embodiments, the expressible nucleic acid sequence encodes a polypeptide free of carbohydrate proximate to at least 50 amino acids from the carboxy end of the polypeptide.

[0113] In some embodiments, the expressible nucleic acid sequence of the disclosure comprises at least a first nucleic acid sequence encoding a first, a second and/or a third polypeptides, each first, second or third polypeptide comprising a viral antigen. In some embodiments, the expressible nucleic acid sequence encodes one or a plurality of fusion proteins, each fusion protein comprising at least a first, a second, and/or a third polypeptide contiguously linked by a linker sequence. In some embodiments, the expressible nucleic acid sequence of the disclosure comprises at least a first nucleic acid sequence encoding at least one self-assembling polypeptide. In some embodiments, the self-assembling polypeptide is at least one self-assembling component of a nanoparticle or at least one coronaviral monomer, the coronaviral monomer capable of assembling into a coronaviral trimer upon expression in a cell. In some embodiments, the expressible nucleic acid sequence comprises a nucleic acid sequence encoding a coronaviral antigen, but free of a nucleic acid sequence encoding a self-assembling polypeptide. In some embodiments, the expressible nucleic acid sequence of the disclosure comprises a nucleic acid sequence operably linked to a regulatory sequence and encodes a fusion peptide comprising one or a plurality of self-assembling polypeptides, wherein at least one of the self-assembling polypeptides is a self-assembling coronaviral antigen.

[0114] In some embodiments, upon administration to a subject a composition comprising the expressible nucleic acid sequence of the disclosure, the expressible nucleic acid sequence is transfected or transduced into an antigen presenting cell. After a plurality of expressible nucleic acid sequences are expressed, the self-assembling polypeptides assemble with into a non-native form of a viral antigen. In some embodiments, the non-native form of a viral antigen comprises a coronaviral trimer exposing an amino acid sequence that is not naturally exposed or free of carbohydrate as compared to its corresponding native form or variants thereof. Expression and presentation of the one or plurality of self-assembling polypeptides elicits an immune response against an epitope. In some embodiments, the epitope comprises a non-native secondary structure of the one or plurality of self-assembling polypeptides.

[0115] In some embodiments, the comopsitions comprise a nucleic acid seqeunce encoding any combination of nucleic acid sequences disclosed herein or vairants thereof. In some embodiments, the comopsitions comprise a viral particle that comprises an expressible nucleic acid seqeunce encoding any combination of nucleic acid sequences disclosed herein or variants thereof. The component of the self-assemblying peptide can be any monomer that, upon expression, self-assembles into a particle comprising 7, 14, 27 or 60 peptides sided particle, each peptide side fused to at least one antigen from the Coronoviridae family. In some embodiments, the composition comprises a particle comprising 7, 14, 27 or 60 peptides sided particle, each peptide side is fused to at least one antigen from the Coronoviridae family, wherein the antigen is positioned in an energetically stable state as compared to the unassociated energy state. In some emboidments, the disclosure relates to a cell comprising a particle comprising 7, 14, 27 or 60 peptides sided particle, each peptide side is fused to at least one antigen from the Coronoviridae family, wherein the antigen is positioned in an energetically stable state as compared to the unassociated energy state. In some embodiments, the particle is able to display the at least one viral antigen in a conformationally stable state that is more immunologically active, such activity elicting a more therapeutically effective immune response as compared to eh immune response elicited from administration of the DNA or RNA. In some embodiments, the energetically stable state is identified by association of the peptide to an antibody through surface plasmon resonance (SPR). In some embodiments, the energetically stable state is measured by absorbance units when either a ligand for the antigen or the antigen is immobilized to a surface, and the other binding partner is then passed over the surface as analyte. In some embodiments, the association can be measured through SPR on a BIACORE® system.

[0116] A detailed discussion of the technical aspects of the BIACORE® instruments and the phenomenon of SPR may be found in U.S. Pat. No. 5,313,264 (the full disclosure of which is incorporated by reference herein in its entirety). In the BIACORE® system, the SPR response values are expressed in resonance units (RU). One RU represents a change of 0.0001° in the angle of minimum reflected light intensity. For an SPR based sensor system like the BIACORE® system, a difference in refractive index between the two guiding fluids of, say, about 100 RU may be convenient, and the fluid interface position may be determined by means of per se conventional sensorgrams.

[0117] In some embodiments, it may be preferred to keep the total flow rate constant when introducing the sample flow. In such a case, the flow rates of the two guiding fluids are reduced while maintaining the flow rate ratio between them. Assume, for example, that the flow rate of one guiding fluid is 70 μl/min and the flow rate of the other guiding fluid is 30 μl/min, the total flow rate being 100 μl/min, and that a sample fluid flow of 20 μl/min is introduced between the guiding fluids. To maintain the total fluid flow rate at 100 μl/min, the flow rates of the guiding fluids will have to be reduced to 60 and 20 μl/min, respectively. The position of a sample fluid flow on a surface may be presented in various ways. A non-limiting example of a experiment indicating the relative responses obtained at different detector rows as the sample flow is guided laterally across the sensing surface of a flow cell by two guiding buffers in a BIACORE® system equipped with a ψ-cell (BIACORE® S51 is a SPR-based biosensor instrument, normally equipped with two Y-type flow cells, each allowing a dual flow over the a sensor surface for hydrodynamic addressing; Biacore AB, Uppsala, Sweden). Total buffer flow can be set to 100 μl/min, and the flow rates of the two buffer flows can be changed in steps of 2 μl/min, starting with 2 μl/min for one buffer and 98 μl/min for the other. Sample fluid flow can be 20 μl/min all the time. Relative responses>0.1 (i.e. 10% coverage of the detector row) are represented are measured as absorbance over time. This approach thus permits convenient visual monitoring of the sample fluid flow.

[0118] In some embodiments, the stability of an antigen secondary structure with an elevated stability as compared to a native antigen or antigen not fused to self-assemblying peptide is from about 10 to about 10,000 RU more than the RU from a control as measured by SPR. In some embodiments, the stability of an antigen secondary structure with an elevated stability as compared to a native antigen or antigen not fused to self-assemblying peptide is from about 5 to about 1,000 RU more than the RU from a control as measured by SPR. In some embodiments, the stability of an antigen secondary structure with an elevated stability as compared to a native antigen or antigen not fused to self-assemblying peptide is from about 100 to about 10,000 RU more than the RU from a control as measured by SPR. In some embodiments, the stability of an antigen secondary structure with an elevated stability as compared to a native antigen or antigen not fused to self-assemblying peptide is from about 100 to about 500 RU more than the RU from a control as measured by SPR. In some embodiments, the stability of an antigen secondary structure with an elevated stability as compared to a native antigen or antigen not fused to self-assemblying peptide is from about 100 to about 200 RU more than the RU from a control as measured by SPR.

[0119] 5. Regulatory Sequences

[0120] In some embodiments, the expressible nucleic acid sequence can be operably linked to one or a plurality of regulatory sequences. The term “regulatory sequence” as used herein refer to DNA sequences which are necessary to effect expression of sequences to which they are ligated. The term “regulatory sequence” is intended to include, as a minimum, all components necessary for expression and optionally additional advantageous components. Examples of regulatory sequences include, but not limited to, promoters, enhancers and other expression control elements (e.g., polyadenylation signals). Further examples of regulatory sequences are described in, for example, Goeddel, 1990, Gene Expression Technology: Methods in Enzymology 185, Academic Press, San Diego, Calif. and Baron et al., 1995, Nucleic Acids Res. 23:3605-06. In some embodiments, the regulatory sequence is a promoter sequence. As used herein, a “promoter” means a region of DNA upstream from the transcription start and which is involved in binding RNA polymerase and other proteins to start transcription. Reference herein to a “promoter” is to be taken in its broadest context and includes the transcriptional regulatory sequences derived from a classical eukaryotic genomic gene, including the TATA box which is required for accurate transcription initiation, with or without a CCAAT box sequence and additional regulatory elements (i.e. upstream activating sequences, enhancers and silencers) which alter gene expression in response to developmental and/or external stimuli, or in a tissue-specific manner. Consequently, a repressible promoter's rate of transcription decreases in response to a repressing agent. An inducible promoter's rate of transcription increases in response to an inducing agent. A constitutive promoter's rate of transcription is not specifically regulated, though it can vary under the influence of general metabolic conditions. The term “promoter” also includes the transcriptional regulatory sequences of a classical prokaryotic gene, in which case it may include a −35 box sequence and/or a −10 box transcriptional regulatory sequences. The term “promoter” is also used to describe a synthetic or fusion molecule, or derivative which confers, activates or enhances expression of a nucleic acid molecule in a cell, tissue or organ.

[0121] 6. Expressible Nucleic Acid Sequences

[0122] The expressible nucleic acid sequence comprised in the composition of the present disclosure can be in form of a DNA molecule, a RNA molecule or transcript, or a DNA/RNA hybrid. In some embodiments, the expressible nucleic acid sequence is in form of a DNA molecule. In some embodiments, the expressible nucleic acid sequence is in form of a RNA molecule or transcript. In some embodiments, the expressible nucleic acid sequence is in form of a DNA/RNA hybrid.

[0123] In some embodiments, the expressible nucleic acid sequence comprises a first nucleic acid sequence encoding a self-assembling polypeptide comprising at least about 60%, 65%, 70%, 75%, 80%, 85%, 86%, 87%, 88%, 89%, 90%, 91%, 92%, 93%, 94%, 95%, 96%, 97%, 98%, 99% or 100% sequence identity to SEQ ID NO: 8, or a functional fragment or variant thereof, and a second nucleic acid sequence encoding a viral antigen comprising at least about 60%, 65%, 70%, 75%, 80%, 85%, 86%, 87%, 88%, 89%, 90%, 91%, 92%, 93%, 94%, 95%, 96%, 97%, 98%, 99% or 100% sequence identity to SEQ ID NO: 60, SEQ ID NO: 62, SEQ ID NO: 64, SEQ ID NO: 66, SEQ ID NO: 171, SEQ ID NO: 172, SEQ ID NO: 173, SEQ ID NO: 174, SEQ ID NO: 175, SEQ ID NO: 176 or SEQ ID NO: 177, or a functional fragment or variant thereof. In some embodiments, the expressible nucleic acid sequence comprises a first nucleic acid sequence encoding a self-assembling polypeptide comprising at least about 60%, 65%, 70%, 75%, 80%, 85%, 86%, 87%, 88%, 89%, 90%, 91%, 92%, 93%, 94%, 95%, 96%, 97%, 98%, 99% or 100% sequence identity to SEQ ID NO: 10, or a functional fragment or variant thereof, and a second nucleic acid sequence encoding a viral antigen comprising at least about 60%, 65%, 70%, 75%, 80%, 85%, 86%, 87%, 88%, 89%, 90%, 91%, 92%, 93%, 94%, 95%, 96%, 97%, 98%, 99% or 100% sequence identity SEQ ID NO: 60, SEQ ID NO: 62, SEQ ID NO: 64, SEQ ID NO: 66, SEQ ID NO: 171, SEQ ID NO: 172, SEQ ID NO: 173, SEQ ID NO: 174, SEQ ID NO: 175, SEQ ID NO: 176 or SEQ ID NO: 177, or a functional fragment or variant thereof. In some embodiments, the expressible nucleic acid sequence comprises a first nucleic acid sequence encoding a self-assembling polypeptide comprising at least about 60%, 65%, 70%, 75%, 80%, 85%, 86%, 87%, 88%, 89%, 90%, 91%, 92%, 93%, 94%, 95%, 96%, 97%, 98%, 99% or 100% sequence identity to SEQ ID NO: 12, or a functional fragment or variant thereof, and a second nucleic acid sequence encoding a viral antigen comprising at least about 60%, 65%, 70%, 75%, 80%, 85%, 86%, 87%, 88%, 89%, 90%, 91%, 92%, 93%, 94%, 95%, 96%, 97%, 98%, 99% or 100% sequence identity to SEQ ID NO: 60, SEQ ID NO: 62, SEQ ID NO: 64, SEQ ID NO: 66, SEQ ID NO: 171, SEQ ID NO: 172, SEQ ID NO: 173, SEQ ID NO: 174, SEQ ID NO: 175, SEQ ID NO: 176 or SEQ ID NO: 177, or a functional fragment or variant thereof. In some embodiments, the expressible nucleic acid sequence comprises a first nucleic acid sequence encoding a self-assembling polypeptide comprising at least about 60%, 65%, 70%, 75%, 80%, 85%, 86%, 87%, 88%, 89%, 90%, 91%, 92%, 93%, 94%, 95%, 96%, 97%, 98%, 99% or 100% sequence identity to SEQ ID NO: 14, or a functional fragment or variant thereof, and a second nucleic acid sequence encoding a viral antigen comprising at least about 60%, 65%, 70%, 75%, 80%, 85%, 86%, 87%, 88%, 89%, 90%, 91%, 92%, 93%, 94%, 95%, 96%, 97%, 98%, 99% or 100% sequence identity to SEQ ID NO: 60, SEQ ID NO: 62, SEQ ID NO: 64, SEQ ID NO: 66, SEQ ID NO: 171, SEQ ID NO: 172, SEQ ID NO: 173, SEQ ID NO: 174, SEQ ID NO: 175, SEQ ID NO: 176 or SEQ ID NO: 177, or a functional fragment or variant thereof. In some embodiments, the expressible nucleic acid sequence comprises a first nucleic acid sequence encoding a self-assembling polypeptide comprising at least about 60%, 65%, 70%, 75%, 80%, 85%, 86%, 87%, 88%, 89%, 90%, 91%, 92%, 93%, 94%, 95%, 96%, 97%, 98%, 99% or 100% sequence identity to SEQ ID NO: 16, or a functional fragment or variant thereof, and a second nucleic acid sequence encoding a viral antigen comprising at least about 60%, 65%, 70%, 75%, 80%, 85%, 86%, 87%, 88%, 89%, 90%, 91%, 92%, 93%, 94%, 95%, 96%, 97%, 98%, 99% or 100% sequence identity to SEQ ID NO: 60, SEQ ID NO: 62, SEQ ID NO: 64, SEQ ID NO: 66, SEQ ID NO: 171, SEQ ID NO: 172, SEQ ID NO: 173, SEQ ID NO: 174, SEQ ID NO: 175, SEQ ID NO: 176 or SEQ ID NO: 177, or a functional fragment or variant thereof. In some embodiments, the expressible nucleic acid sequence comprises a first nucleic acid sequence encoding a self-assembling polypeptide comprising at least about 60%, 65%, 70%, 75%, 80%, 85%, 86%, 87%, 88%, 89%, 90%, 91%, 92%, 93%, 94%, 95%, 96%, 97%, 98%, 99% or 100% sequence identity to SEQ ID NO: 18, or a functional fragment or variant thereof, and a second nucleic acid sequence encoding a viral antigen comprising at least about 60%, 65%, 70%, 75%, 80%, 85%, 86%, 87%, 88%, 89%, 90%, 91%, 92%, 93%, 94%, 95%, 96%, 97%, 98%, 99% or 100% sequence identity to SEQ ID NO: 60, SEQ ID NO: 62, SEQ ID NO: 64, SEQ ID NO: 66, SEQ ID NO: 171, SEQ ID NO: 172, SEQ ID NO: 173, SEQ ID NO: 174, SEQ ID NO: 175, SEQ ID NO: 176 or SEQ ID NO: 177, or a functional fragment or variant thereof. In some embodiments, the expressible nucleic acid sequence comprises a first nucleic acid sequence encoding a self-assembling polypeptide comprising at least about 60%, 65%, 70%, 75%, 80%, 85%, 86%, 87%, 88%, 89%, 90%, 91%, 92%, 93%, 94%, 95%, 96%, 97%, 98%, 99% or 100% sequence identity to SEQ ID NO: 20, or a functional fragment or variant thereof, and a second nucleic acid sequence encoding a viral antigen comprising at least about 60%, 65%, 70%, 75%, 80%, 85%, 86%, 87%, 88%, 89%, 90%, 91%, 92%, 93%, 94%, 95%, 96%, 97%, 98%, 99% or 100% sequence identity to SEQ ID NO: 60, SEQ ID NO: 62, SEQ ID NO: 64, SEQ ID NO: 66, SEQ ID NO: 171, SEQ ID NO: 172, SEQ ID NO: 173, SEQ ID NO: 174, SEQ ID NO: 175, SEQ ID NO: 176 or SEQ ID NO: 177, or a functional fragment or variant thereof.

[0124] In some embodiments, the expressible nucleic acid sequence comprises a first nucleic acid sequence encoding a self-assembling polypeptide comprising at least about 60%, 65%, 70%, 75%, 80%, 85%, 86%, 87%, 88%, 89%, 90%, 91%, 92%, 93%, 94%, 95%, 96%, 97%, 98%, 99% or 100% sequence identity to SEQ ID NO: 8, or a functional fragment or variant thereof, and a second nucleic acid sequence encoding a viral antigen comprising at least about 60%, 65%, 70%, 75%, 80%, 85%, 86%, 87%, 88%, 89%, 90%, 91%, 92%, 93%, 94%, 95%, 96%, 97%, 98%, 99% or 100% sequence identity to SEQ ID NO: 175. In some embodiments, the expressible nucleic acid sequence comprises a first nucleic acid sequence encoding a self-assembling polypeptide comprising at least about 60%, 65%, 70%, 75%, 80%, 85%, 86%, 87%, 88%, 89%, 90%, 91%, 92%, 93%, 94%, 95%, 96%, 97%, 98%, 99% or 100% sequence identity to SEQ ID NO: 8, or a functional fragment or variant thereof, and a second nucleic acid sequence encoding a viral antigen comprising at least about 60%, 65%, 70%, 75%, 80%, 85%, 86%, 87%, 88%, 89%, 90%, 91%, 92%, 93%, 94%, 95%, 96%, 97%, 98%, 99% or 100% sequence identity to SEQ ID NO: 176. In some embodiments, the expressible nucleic acid sequence comprises a first nucleic acid sequence encoding a self-assembling polypeptide comprising at least about 60%, 65%, 70%, 75%, 80%, 85%, 86%, 87%, 88%, 89%, 90%, 91%, 92%, 93%, 94%, 95%, 96%, 97%, 98%, 99% or 100% sequence identity to SEQ ID NO: 8, or a functional fragment or variant thereof, and a second nucleic acid sequence encoding a viral antigen comprising at least about 60%, 65%, 70%, 75%, 80%, 85%, 86%, 87%, 88%, 89%, 90%, 91%, 92%, 93%, 94%, 95%, 96%, 97%, 98%, 99% or 100% sequence identity to SEQ ID NO: 177. In some embodiments, the expressible nucleic acid sequence comprises a first nucleic acid sequence encoding a self-assembling polypeptide comprising at least about 60%, 65%, 70%, 75%, 80%, 85%, 86%, 87%, 88%, 89%, 90%, 91%, 92%, 93%, 94%, 95%, 96%, 97%, 98%, 99% or 100% sequence identity to SEQ ID NO: 12, or a functional fragment or variant thereof, and a second nucleic acid sequence encoding a viral antigen comprising at least about 60%, 65%, 70%, 75%, 80%, 85%, 86%, 87%, 88%, 89%, 90%, 91%, 92%, 93%, 94%, 95%, 96%, 97%, 98%, 99% or 100% sequence identity to SEQ ID NO: 175. In some embodiments, the expressible nucleic acid sequence comprises a first nucleic acid sequence encoding a self-assembling polypeptide comprising at least about 60%, 65%, 70%, 75%, 80%, 85%, 86%, 87%, 88%, 89%, 90%, 91%, 92%, 93%, 94%, 95%, 96%, 97%, 98%, 99% or 100% sequence identity to SEQ ID NO: 12, or a functional fragment or variant thereof, and a second nucleic acid sequence encoding a viral antigen comprising at least about 60%, 65%, 70%, 75%, 80%, 85%, 86%, 87%, 88%, 89%, 90%, 91%, 92%, 93%, 94%, 95%, 96%, 97%, 98%, 99% or 100% sequence identity to SEQ ID NO: 176. In some embodiments, the expressible nucleic acid sequence comprises a first nucleic acid sequence encoding a self-assembling polypeptide comprising at least about 60%, 65%, 70%, 75%, 80%, 85%, 86%, 87%, 88%, 89%, 90%, 91%, 92%, 93%, 94%, 95%, 96%, 97%, 98%, 99% or 100% sequence identity to SEQ ID NO: 12, or a functional fragment or variant thereof, and a second nucleic acid sequence encoding a viral antigen comprising at least about 60%, 65%, 70%, 75%, 80%, 85%, 86%, 87%, 88%, 89%, 90%, 91%, 92%, 93%, 94%, 95%, 96%, 97%, 98%, 99% or 100% sequence identity to SEQ ID NO: 177.

[0125] In some embodiments, the expressible nucleic acid sequence comprises a first nucleic acid sequence encoding a leader sequence comprising at least about 60%, 65%, 70%, 75%, 80%, 85%, 86%, 87%, 88%, 89%, 90%, 91%, 92%, 93%, 94%, 95%, 96%, 97%, 98%, 99% or 100% sequence identity to SEQ ID NO: 1, or a functional fragment or variant thereof, and a second nucleic acid sequence encoding a viral antigen comprising at least about 60%, 65%, 70%, 75%, 80%, 85%, 86%, 87%, 88%, 89%, 90%, 91%, 92%, 93%, 94%, 95%, 96%, 97%, 98%, 99% or 100% sequence identity to SEQ ID NO: 60, SEQ ID NO: 62, SEQ ID NO: 64, SEQ ID NO: 66, SEQ ID NO: 171, SEQ ID NO: 172, SEQ ID NO: 173, SEQ ID NO: 174, SEQ ID NO: 175, SEQ ID NO: 176 or SEQ ID NO: 177, or a functional fragment or variant thereof. In some embodiments, the expressible nucleic acid sequence comprises a first nucleic acid sequence encoding a leader sequence comprising at least about 60%, 65%, 70%, 75%, 80%, 85%, 86%, 87%, 88%, 89%, 90%, 91%, 92%, 93%, 94%, 95%, 96%, 97%, 98%, 99% or 100% sequence identity to SEQ ID NO: 5, or a functional fragment or variant thereof, and a second nucleic acid sequence encoding a viral antigen comprising at least about 60%, 65%, 70%, 75%, 80%, 85%, 86%, 87%, 88%, 89%, 90%, 91%, 92%, 93%, 94%, 95%, 96%, 97%, 98%, 99% or 100% sequence identity to SEQ ID NO: 60, SEQ ID NO: 62, SEQ ID NO: 64, SEQ ID NO: 66, SEQ ID NO: 171, SEQ ID NO: 172, SEQ ID NO: 173, SEQ ID NO: 174, SEQ ID NO: 175, SEQ ID NO: 176 or SEQ ID NO: 177, or a functional fragment or variant thereof.

[0126] In some embodiments, the expressible nucleic acid sequence comprises a first nucleic acid sequence encoding a leader sequence comprising at least about 60%, 65%, 70%, 75%, 80%, 85%, 86%, 87%, 88%, 89%, 90%, 91%, 92%, 93%, 94%, 95%, 96%, 97%, 98%, 99% or 100% sequence identity to SEQ ID NO: 1, or a functional fragment or variant thereof, and a second nucleic acid sequence encoding a viral antigen comprising at least about 60%, 65%, 70%, 75%, 80%, 85%, 86%, 87%, 88%, 89%, 90%, 91%, 92%, 93%, 94%, 95%, 96%, 97%, 98%, 99% or 100% sequence identity to SEQ ID NO: 171. In some embodiments, the expressible nucleic acid sequence comprises a first nucleic acid sequence encoding a leader sequence comprising at least about 60%, 65%, 70%, 75%, 80%, 85%, 86%, 87%, 88%, 89%, 90%, 91%, 92%, 93%, 94%, 95%, 96%, 97%, 98%, 99% or 100% sequence identity to SEQ ID NO: 1, or a functional fragment or variant thereof, and a second nucleic acid sequence encoding a viral antigen comprising at least about 60%, 65%, 70%, 75%, 80%, 85%, 86%, 87%, 88%, 89%, 90%, 91%, 92%, 93%, 94%, 95%, 96%, 97%, 98%, 99% or 100% sequence identity to SEQ ID NO: 172. In some embodiments, the expressible nucleic acid sequence comprises a first nucleic acid sequence encoding a leader sequence comprising at least about 60%, 65%, 70%, 75%, 80%, 85%, 86%, 87%, 88%, 89%, 90%, 91%, 92%, 93%, 94%, 95%, 96%, 97%, 98%, 99% or 100% sequence identity to SEQ ID NO: 1, or a functional fragment or variant thereof, and a second nucleic acid sequence encoding a viral antigen comprising at least about 60%, 65%, 70%, 75%, 80%, 85%, 86%, 87%, 88%, 89%, 90%, 91%, 92%, 93%, 94%, 95%, 96%, 97%, 98%, 99% or 100% sequence identity to SEQ ID NO: 173. In some embodiments, the expressible nucleic acid sequence comprises a first nucleic acid sequence encoding a leader sequence comprising at least about 60%, 65%, 70%, 75%, 80%, 85%, 86%, 87%, 88%, 89%, 90%, 91%, 92%, 93%, 94%, 95%, 96%, 97%, 98%, 99% or 100% sequence identity to SEQ ID NO: 1, or a functional fragment or variant thereof, and a second nucleic acid sequence encoding a viral antigen comprising at least about 60%, 65%, 70%, 75%, 80%, 85%, 86%, 87%, 88%, 89%, 90%, 91%, 92%, 93%, 94%, 95%, 96%, 97%, 98%, 99% or 100% sequence identity to SEQ ID NO: 174. In some embodiments, the expressible nucleic acid sequence comprises a first nucleic acid sequence encoding a leader sequence comprising at least about 60%, 65%, 70%, 75%, 80%, 85%, 86%, 87%, 88%, 89%, 90%, 91%, 92%, 93%, 94%, 95%, 96%, 97%, 98%, 99% or 100% sequence identity to SEQ ID NO: 1, or a functional fragment or variant thereof, and a second nucleic acid sequence encoding a viral antigen comprising at least about 60%, 65%, 70%, 75%, 80%, 85%, 86%, 87%, 88%, 89%, 90%, 91%, 92%, 93%, 94%, 95%, 96%, 97%, 98%, 99% or 100% sequence identity to SEQ ID NO: 175. In some embodiments, the expressible nucleic acid sequence comprises a first nucleic acid sequence encoding a leader sequence comprising at least about 60%, 65%, 70%, 75%, 80%, 85%, 86%, 87%, 88%, 89%, 90%, 91%, 92%, 93%, 94%, 95%, 96%, 97%, 98%, 99% or 100% sequence identity to SEQ ID NO: 1, or a functional fragment or variant thereof, and a second nucleic acid sequence encoding a viral antigen comprising at least about 60%, 65%, 70%, 75%, 80%, 85%, 86%, 87%, 88%, 89%, 90%, 91%, 92%, 93%, 94%, 95%, 96%, 97%, 98%, 99% or 100% sequence identity to SEQ ID NO: 176. In some embodiments, the expressible nucleic acid sequence comprises a first nucleic acid sequence encoding a leader sequence comprising at least about 60%, 65%, 70%, 75%, 80%, 85%, 86%, 87%, 88%, 89%, 90%, 91%, 92%, 93%, 94%, 95%, 96%, 97%, 98%, 99% or 100% sequence identity to SEQ ID NO: 1, or a functional fragment or variant thereof, and a second nucleic acid sequence encoding a viral antigen comprising at least about 60%, 65%, 70%, 75%, 80%, 85%, 86%, 87%, 88%, 89%, 90%, 91%, 92%, 93%, 94%, 95%, 96%, 97%, 98%, 99% or 100% sequence identity to SEQ ID NO: 177. In some embodiments, the expressible nucleic acid sequence comprises a first nucleic acid sequence encoding a leader sequence comprising at least about 60%, 65%, 70%, 75%, 80%, 85%, 86%, 87%, 88%, 89%, 90%, 91%, 92%, 93%, 94%, 95%, 96%, 97%, 98%, 99% or 100% sequence identity to SEQ ID NO: 5, or a functional fragment or variant thereof, and a second nucleic acid sequence encoding a viral antigen comprising at least about 60%, 65%, 70%, 75%, 80%, 85%, 86%, 87%, 88%, 89%, 90%, 91%, 92%, 93%, 94%, 95%, 96%, 97%, 98%, 99% or 100% sequence identity to SEQ ID NO: 171. In some embodiments, the expressible nucleic acid sequence comprises a first nucleic acid sequence encoding a leader sequence comprising at least about 60%, 65%, 70%, 75%, 80%, 85%, 86%, 87%, 88%, 89%, 90%, 91%, 92%, 93%, 94%, 95%, 96%, 97%, 98%, 99% or 100% sequence identity to SEQ ID NO: 5, or a functional fragment or variant thereof, and a second nucleic acid sequence encoding a viral antigen comprising at least about 60%, 65%, 70%, 75%, 80%, 85%, 86%, 87%, 88%, 89%, 90%, 91%, 92%, 93%, 94%, 95%, 96%, 97%, 98%, 99% or 100% sequence identity to SEQ ID NO: 172. In some embodiments, the expressible nucleic acid sequence comprises a first nucleic acid sequence encoding a leader sequence comprising at least about 60%, 65%, 70%, 75%, 80%, 85%, 86%, 87%, 88%, 89%, 90%, 91%, 92%, 93%, 94%, 95%, 96%, 97%, 98%, 99% or 100% sequence identity to SEQ ID NO: 5, or a functional fragment or variant thereof, and a second nucleic acid sequence encoding a viral antigen comprising at least about 60%, 65%, 70%, 75%, 80%, 85%, 86%, 87%, 88%, 89%, 90%, 91%, 92%, 93%, 94%, 95%, 96%, 97%, 98%, 99% or 100% sequence identity to SEQ ID NO: 173. In some embodiments, the expressible nucleic acid sequence comprises a first nucleic acid sequence encoding a leader sequence comprising at least about 60%, 65%, 70%, 75%, 80%, 85%, 86%, 87%, 88%, 89%, 90%, 91%, 92%, 93%, 94%, 95%, 96%, 97%, 98%, 99% or 100% sequence identity to SEQ ID NO: 5, or a functional fragment or variant thereof, and a second nucleic acid sequence encoding a viral antigen comprising at least about 60%, 65%, 70%, 75%, 80%, 85%, 86%, 87%, 88%, 89%, 90%, 91%, 92%, 93%, 94%, 95%, 96%, 97%, 98%, 99% or 100% sequence identity to SEQ ID NO: 174. In some embodiments, the expressible nucleic acid sequence comprises a first nucleic acid sequence encoding a leader sequence comprising at least about 60%, 65%, 70%, 75%, 80%, 85%, 86%, 87%, 88%, 89%, 90%, 91%, 92%, 93%, 94%, 95%, 96%, 97%, 98%, 99% or 100% sequence identity to SEQ ID NO: 5, or a functional fragment or variant thereof, and a second nucleic acid sequence encoding a viral antigen comprising at least about 60%, 65%, 70%, 75%, 80%, 85%, 86%, 87%, 88%, 89%, 90%, 91%, 92%, 93%, 94%, 95%, 96%, 97%, 98%, 99% or 100% sequence identity to SEQ ID NO: 175. In some embodiments, the expressible nucleic acid sequence comprises a first nucleic acid sequence encoding a leader sequence comprising at least about 60%, 65%, 70%, 75%, 80%, 85%, 86%, 87%, 88%, 89%, 90%, 91%, 92%, 93%, 94%, 95%, 96%, 97%, 98%, 99% or 100% sequence identity to SEQ ID NO: 5, or a functional fragment or variant thereof, and a second nucleic acid sequence encoding a viral antigen comprising at least about 60%, 65%, 70%, 75%, 80%, 85%, 86%, 87%, 88%, 89%, 90%, 91%, 92%, 93%, 94%, 95%, 96%, 97%, 98%, 99% or 100% sequence identity to SEQ ID NO: 176. In some embodiments, the expressible nucleic acid sequence comprises a first nucleic acid sequence encoding a leader sequence comprising at least about 60%, 65%, 70%, 75%, 80%, 85%, 86%, 87%, 88%, 89%, 90%, 91%, 92%, 93%, 94%, 95%, 96%, 97%, 98%, 99% or 100% sequence identity to SEQ ID NO: 5, or a functional fragment or variant thereof, and a second nucleic acid sequence encoding a viral antigen comprising at least about 60%, 65%, 70%, 75%, 80%, 85%, 86%, 87%, 88%, 89%, 90%, 91%, 92%, 93%, 94%, 95%, 96%, 97%, 98%, 99% or 100% sequence identity to SEQ ID NO: 177.

[0127] Exemplary expressible nucleic acid sequences include, but not limited to those provided in TABLE 1.

TABLE 1
Exemplary Expressible Nucleic Acid Sequences (DNA and RNA) of the
Disclosure and the corresponding coding polypeptide sequences (underlined amino acid
residues are glycan sites).
I. CoV2 Nanoparticle Constructs
WuhanS_FP12_L9GT60_pVax
ggatccgccaccatggactggacctggattctgttcctggtggccgccgccacaagggtgcacagcatgcagatctacgaaggaaaa
ctgaccgctgagggactgaggttcggaattgtcgcaagccgcgcgaatcacgcactggtggataggctggtggaaggcgctatcga
cgcaattgtccggcacggcgggagagaggaagacatcacactggtgagagtctgcggcagctgggagattcccgtggcagctgga
gaactggctcgaaaggaggacatcgatgccgtgatcgctattggggtcctgtgccgaggagcaactcccagcttcgactacatcgcct
cagaagtgagcaaggggctggctgatctgtccctggagctgaggaaacctatcacttttggcgtgattactgccgacaccctggaaca
ggcaatcgaggcggccggcacctgccatggaaacaaaggctgggaagcagccctgtgcgctattgagatggcaaatctgttcaaat
ctctgcgaggaggctccggaggatctggagggagtggaggctcaggaggaggcgacaccatcacactgccatgccgccctgcac
cacctccacattgtagctccaacatcaccggcctgattctgacaagacaggggggatatagtaacgataataccgtgattttcaggccct
caggaggggactggagggacatcgcacgatgccagattgctggaacagtggtctctactcagctgtttctgaacggcagtctggctga
ggaagaggtggtcatccgatctgaagactggcgggataatgcaaagtcaatttgtgtgcagctgaacacaagcgtcgagatcaattgc
actggcgcagggcactgtaacatttctcgggccaaatgggataataccctgaagcagatcgccagtaaactgagagagcagtacggc
aataagacaatcatcttcaagccttctagtggaggcgacccagagttcgtgaaccatagctttaattgcgggggagagttcttttattgtg
attccacacagctgttcgatagcacttggtttgattccaccggtgggagcggaagtggcggttccggatcattcattgaagaccttctcttt
aacaaggtgaccctcgccgatgcaggtttcattaagcaatatggtgattgcctgggagacatcgcggctcgtgatcttatttgtgcgcag
aaattttaatga (SEQ ID NO: 68)
ggauccgccaccauggacuggaccuggauucuguuccugguggccgccgccacaagggugcacagcaugcagaucuacg
aaggaaaacugaccgcugagggacugagguucggaauugucgcaagccgcgcgaaucacgcacugguggauaggcuggu
ggaaggcgcuaucgacgcaauuguccggcacggcgggagagaggaagacaucacacuggugagagucugcggcagcugg
gagauucccguggcagcuggagaacuggcucgaaaggaggacaucgaugccgugaucgcuauugggguccugugccgag
gagcaacucccagcuucgacuacaucgccucagaagugagcaaggggcuggcugaucugucccuggagcugaggaaacc
uaucacuuuuggcgugauuacugccgacacccuggaacaggcaaucgaggcggccggcaccugccauggaaacaaaggcu
gggaagcagcccugugcgcuauugagauggcaaaucuguucaaaucucugcgaggaggcuccggaggaucuggagggag
uggaggcucaggaggaggcgacaccaucacacugccaugccgcccugcaccaccuccacauuguagcuccaacaucaccg
gccugauucugacaagacaggggggauauaguaacgauaauaccgugauuuucaggcccucaggaggggacuggaggga
caucgcacgaugccagauugcuggaacaguggucucuacucagcuguuucugaacggcagucuggcugaggaagaggug
gucauccgaucugaagacuggcgggauaaugcaaagucaauuugugugcagcugaacacaagcgucgagaucaauugca
cuggcgcagggcacuguaacauuucucgggccaaaugggauaauacccugaagcagaucgccaguaaacugagagagcag
uacggcaauaagacaaucaucuucaagccuucuaguggaggcgacccagaguucgugaaccauagcuuuaauugcgggg
gagaguucuuuuauugugauuccacacagcuguucgauagcacuugguuugauuccaccggugggagcggaaguggcg
guuccggaucauucauugaagaccuucucuuuaacaaggugacccucgccgaugcagguuucauuaagcaauaugguga
uugccugggagacaucgcggcucgugaucuuauuugugcgcagaaauuuuaauga (SEQ ID NO: 69)
MDWTWILFLVAAATRVHSMQIYEGKLTAEGLRFGIVASRANHALVDRLVEGAIDAI
VRHGGREEDITLVRVCGSWEIPVAAGELARKEDIDAVIAIGVLCRGATPSFDYIASEV
SKGLADLSLELRKPITFGVITADTLEQAIEAAGTCHGNKGWEAALCAIEMANLFKSLR
GGSGGSGGSGGSGGGDTITLPCRPAPPPHCSSNITGLILTRQGGYSNDNTVIFRPSGGD
WRDIARCQIAGTVVSTQLFLNGSLAEEEVVIRSEDWRDNAKSICVQLNTSVEINCTGA
GHCNISRAKW [symbol] LKQIASKLREQYGNKTIIFKPSSGGDPEFVNHSFNCGGEFFYCDS
TQLF [symbol] WF [symbol] GGSGSGGSGSFIEDLLFNKVTLADAGFIKQYGDCLGDIAARDLICA
QKF** (SEQ ID NO: 70)
WuhanS_FP_L9GT60_pVax
ggatccgccaccatggactggacctggattctgttcctggtggccgccgccacaagggtgcacagcatgcagatctacgaaggaaaa
ctgaccgctgagggactgaggttcggaattgtcgcaagccgcgcgaatcacgcactggtggataggctggtggaaggcgctatcga
cgcaattgtccggcacggcgggagagaggaagacatcacactggtgagagtctgcggcagctgggagattcccgtggcagctgga
gaactggctcgaaaggaggacatcgatgccgtgatcgctattggggtcctgtgccgaggagcaactcccagcttcgactacatcgcct
cagaagtgagcaaggggctggctgatctgtccctggagctgaggaaacctatcacttttggcgtgattactgccgacaccctggaaca
ggcaatcgaggcggccggcacctgccatggaaacaaaggctgggaagcagccctgtgcgctattgagatggcaaatctgttcaaat
ctctgcgaggaggctccggaggatctggagggagtggaggctcaggaggaggcgacaccatcacactgccatgccgccctgcac
cacctccacattgtagctccaacatcaccggcctgattctgacaagacaggggggatatagtaacgataataccgtgattttcaggccct
caggaggggactggagggacatcgcacgatgccagattgctggaacagtggtctctactcagctgtttctgaacggcagtctggctga
ggaagaggtggtcatccgatctgaagactggcgggataatgcaaagtcaatttgtgtgcagctgaacacaagcgtcgagatcaattgc
actggcgcagggcactgtaacatttctcgggccaaatgggataataccctgaagcagatcgccagtaaactgagagagcagtacggc
aataagacaatcatcttcaagccttctagtggaggcgacccagagttcgtgaaccatagctttaattgcgggggagagttcttttattgtg
attccacacagctgttcgatagcacttggtttgattccaccggtgggagcggaagtggcggttccggaccttcaaagagatctttcattg
aagacctgcttttcaacaaggtctaatga (SEQ ID NO: 71)
ggauccgccaccauggacuggaccuggauucuguuccugguggccgccgccacaagggugcacagcaugcagaucuacg
aaggaaaacugaccgcugagggacugagguucggaauugucgcaagccgcgcgaaucacgcacugguggauaggcuggu
ggaaggcgcuaucgacgcaauuguccggcacggcgggagagaggaagacaucacacuggugagagucugcggcagcugg
gagauucccguggcagcuggagaacuggcucgaaaggaggacaucgaugccgugaucgcuauugggguccugugccgag
gagcaacucccagcuucgacuacaucgccucagaagugagcaaggggcuggcugaucugucccuggagcugaggaaacc
uaucacuuuuggcgugauuacugccgacacccuggaacaggcaaucgaggcggccggcaccugccauggaaacaaaggcu
gggaagcagcccugugcgcuauugagauggcaaaucuguucaaaucucugcgaggaggcuccggaggaucuggagggag
uggaggcucaggaggaggcgacaccaucacacugccaugccgcccugcaccaccuccacauuguagcuccaacaucaccg
gccugauucugacaagacaggggggauauaguaacgauaauaccgugauuuucaggcccucaggaggggacuggaggga
caucgcacgaugccagauugcuggaacaguggucucuacucagcuguuucugaacggcagucuggcugaggaagaggug
gucauccgaucugaagacuggcgggauaaugcaaagucaauuugugugcagcugaacacaagcgucgagaucaauugca
cuggcgcagggcacuguaacauuucucgggccaaaugggauaauacccugaagcagaucgccaguaaacugagagagcag
uacggcaauaagacaaucaucuucaagccuucuaguggaggcgacccagaguucgugaaccauagcuuuaauugcgggg
gagaguucuuuuauugugauuccacacagcuguucgauagcacuugguuugauuccaccggugggagcggaaguggcg
guuccggaccuucaaagagaucuuucauugaagaccugcuuuucaacaaggucuaauga (SEQ ID NO: 72)
MDWTWILFLVAAATRVHSMQIYEGKLTAEGLRFGIVASRANHALVDRLVEGAIDAI
VRHGGREEDITLVRVCGSWEIPVAAGELARKEDIDAVIAIGVLCRGATPSFDYIASEV
SKGLADLSLELRKPITFGVITADTLEQAIEAAGTCHGNKGWEAALCAIEMANLFKSLR
GGSGGSGGSGGSGGGDTITLPCRPAPPPHCSSNITGLILTRQGGYSNDNTVIFRPSGGD
WRDIARCQIAGTVVSTQLFLNGSLAEEEVVIRSEDWRDNAKSICVQLNTSVEINCTGA
GHCNISRAKW [symbol] LKQIASKLREQYGNKTIIFKPSSGGDPEFVNHSFNCGGEFFYCDS
TQLF [symbol] WF [symbol] GGSGSGGSGPSKRSFIEDLLFNKV** (SEQ ID NO: 73)
WuhanS_RBD_gmax_180_pVax
ggatccgccaccatggactggacctggattctgttcctggtggccgccgccacaagggtgcacagcctctcaattgccccaacgttga
tcaaccgggacaagccatacacgaaagaggaacttatggagatattgcggttggccattatagctgaactcgatgcaattaatctctatg
aacaaatggcccgctatagcgaagacgaaaatgtgagaaagatcttgttggacgtcgctagggaagagaaagcacacgtaggagag
ttcatggctttgttgcttaacctcgaccctgagcaagtcacagagctgaagggcgggttcgaggaagttaaagaattgaccggtataga
agctcacattaatgacaacaagaaagaggaaagtaatgtagagtatttcgagaagctcagatctgccttgttggatggagtcaacaagg
gtcgcagcttgctcaaacatctgcccgttacaagaatagaagggcagtcttttcgagtagacatcatcaaatttgaggacggcgtccga
gtggttaaacaagagtataagcctataccccttcttaagaagaagttctacgtcggcattcgagaactgaatgacgggacatatgatgtc
agcattgctactaaagccggtgagctgctggttaaagacgaagaaagtcttgtgatccgggaaattttgtcaacggaaggcatcaagaa
aatgaaattgtcatcctgggacaatccagaagaagccctgaatgatttgatgaatgcgctccaagaagctagcaatgctagtgctggcc
ccttcggccttattatcaatccaaagcggtacgccaaactgctgaagatctatgaaaagtcaggtaagatgctcgtagaagtactcaagg
aaatcttccggggtggaataatcgtaactcttaatatcgacgaaaacaaagtgattatcttcgctaatacgcccgccgttctggacgtggt
ggtgggtcaagacgttacgctccaggagcttggtccggaaggggatgatgtcgcattcctggtcagtgaagccattggtataagaatc
aagaacccggaagctatagttgttctcgaaggcgggtctggtgggagcggtggtagtggtggttctggtggtggtgggtcaggtggc
ggctcaggcggcggcaatctgtgccctttcggtgaggtctttaatgcaacaagatttgcaagtgtttacgcctggaaccgtaagcgcatt
agcaactgcactgccgattactctgtgctgtacaacagcacaagcttttccacatttaaatgttacggggtttcccctaccaacctcagcg
acctctgctttactaatgtttacgcagattccttcgttatccgaggcgatgaagtccggcagatagctcccggacagaccggcaaaatcg
ctgactacaactataaactgccgaacgacagcacagggtgtgtaattgcttggaacagcaataacctcgattcaaaggttggcggaaat
tacaattatctttaccgtctgttccggaaaagcaatctgaaaccctttgagagagacatcagcacggaaatttatcaagccggttcaacac
catgtaacggagttgaaggctttaattgctattttcccctgcaatcttacggatttcaacctacgaacggggtcggttaccaaccttaccgg
gtggtcgtgctgagcttcgaattgcttcatgccccagccaccgtgtgtgggccataatga (SEQ ID NO: 74)
ggauccgccaccauggacuggaccuggauucuguuccugguggccgccgccacaagggugcacagccucucaauugccc
caacguugaucaaccgggacaagccauacacgaaagaggaacuuauggagauauugcgguuggccauuauagcugaacuc
gaugcaauuaaucucuaugaacaaauggcccgcuauagcgaagacgaaaaugugagaaagaucuuguuggacgucgcua
gggaagagaaagcacacguaggagaguucauggcuuuguugcuuaaccucgacccugagcaagucacagagcugaaggg
cggguucgaggaaguuaaagaauugaccgguauagaagcucacauuaaugacaacaagaaagaggaaaguaauguagag
uauuucgagaagcucagaucugccuuguuggauggagucaacaagggucgcagcuugcucaaacaucugcccguuacaa
gaauagaagggcagucuuuucgaguagacaucaucaaauuugaggacggcguccgagugguuaaacaagaguauaagcc
uauaccccuucuuaagaagaaguucuacgucggcauucgagaacugaaugacgggacauaugaugucagcauugcuacu
aaagccggugagcugcugguuaaagacgaagaaagucuugugauccgggaaauuuugucaacggaaggcaucaagaaaa
ugaaauugucauccugggacaauccagaagaagcccugaaugauuugaugaaugcgcuccaagaagcuagcaaugcuag
ugcuggccccuucggccuuauuaucaauccaaagcgguacgccaaacugcugaagaucuaugaaaagucagguaagaugc
ucguagaaguacucaaggaaaucuuccgggguggaauaaucguaacucuuaauaucgacgaaaacaaagugauuaucuu
cgcuaauacgcccgccguucuggacgugguggugggucaagacguuacgcuccaggagcuugguccggaaggggauga
ugucgcauuccuggucagugaagccauugguauaagaaucaagaacccggaagcuauaguuguucucgaaggcgggucu
ggugggagcggugguaguggugguucuggugguggugggucagguggcggcucaggcggcggcaaucugugcccuuu
cggugaggucuuuaaugcaacaagauuugcaaguguuuacgccuggaaccguaagcgcauuagcaacugcacugccgau
uacucugugcuguacaacagcacaagcuuuuccacauuuaaauguuacgggguuuccccuaccaaccucagcgaccucug
cuuuacuaauguuuacgcagauuccuucguuauccgaggcgaugaaguccggcagauagcucccggacagaccggcaaa
aucgcugacuacaacuauaaacugccgaacgacagcacaggguguguaauugcuuggaacagcaauaaccucgauucaaa
gguuggcggaaauuacaauuaucuuuaccgucuguuccggaaaagcaaucugaaacccuuugagagagacaucagcacg
gaaauuuaucaagccgguucaacaccauguaacggaguugaaggcuuuaauugcuauuuuccccugcaaucuuacggau
uucaaccuacgaacggggucgguuaccaaccuuaccggguggucgugcugagcuucgaauugcuucaugccccagccac
cgugugugggccauaauga (SEQ ID NO: 75)
MDWTWILFLVAAATRVHSLSIAPTLINRDKPYTKEELMEILRLAIIAELDAINLYEQM
ARYSEDENVRKILLDVAREEKAHVGEFMALLLNLDPEQVTELKGGFEEVKELTGIEA
HINDNKKEESNVEYFEKLRSALLDGVNKGRSLLKHLPVTRIEGQSFRVDIIKFEDGVR
VVKQEYKPIPLLKKKFYVGIRELNDGTYDVSIATKAGELLVKDEESLVIREILSTEGIK
KMKLSSWDNPEEALNDLMNALQEASNASAGPFGLIINPKRYAKLLKIYEKSGKMLV
EVLKEIFRGGIIVTLNIDENKVIIFANTPAVLDVVVGQDVTLQELGPEGDDVAFLVSEA
IGIRIKNPEAIVVLEGGSGGSGGSGGSGGGGSGGGSGGGNLCPFGEVFNATRFASVYA
WNRKRISNCTADYSVLYNSTSFSTFKCYGVSPTNLSDLCFTNVYADSFVIRGDEVRQI
APGQTGKIADYNYKLPNDSTGCVIAWNSNNLDSKVGGNYNYLYRLFRKSNLKPFER
DISTEIYQAGSTPCNGVEGFNCYFPLQSYGFQPTNGVGYQPYRVVVLSFELLHAPATV
CGP** (SEQ ID NO: 76)
WuhanS_RBD_gmax_LS_pVax
ggatccgccaccatggactggacctggattctgttcctggtggccgccgccacaagggtgcacagcatgcagatctacgaaggaaaa
ctgaccgctgagggactgaggttcggaattgtcgcaagccgcgcgaatcacgcactggtggataggctggtggaaggcgctatcga
cgcaattgtccggcacggcgggagagaggaagacatcacactggtgagagtctgcggcagctgggagattcccgtggcagctgga
gaactggctcgaaaggaggacatcgatgccgtgatcgctattggggtcctgtgccgaggagcaactcccagcttcgactacatcgcct
cagaagtgagcaaggggctggctgatctgtccctggagctgaggaaacctatcacttttggcgtgattactgccgacaccctggaaca
ggcaatcgaggcggccggcacctgccatggaaacaaaggctgggaagcagccctgtgcgctattgagatggcaaatctgttcaaat
ctctgcgaggaggctccggaggatctggagggagtggaggctcaggaggaggcaatctgtgccctttcggtgaggtctttaatgcaa
caagatttgcaagtgtttacgcctggaaccgtaagcgcattagcaactgcactgccgattactctgtgctgtacaacagcacaagcttttc
cacatttaaatgttacggggtttcccctaccaacctcagcgacctctgctttactaatgtttacgcagattccttcgttatccgaggcgatga
agtccggcagatagctcccggacagaccggcaaaatcgctgactacaactataaactgccgaacgacagcacagggtgtgtaattgc
ttggaacagcaataacctcgattcaaaggttggcggaaattacaattatctttaccgtctgttccggaaaagcaatctgaaaccctttgag
agagacatcagcacggaaatttatcaagccggttcaacaccatgtaacggagttgaaggctttaattgctattttcccctgcaatcttacg
gatttcaacctacgaacggggtcggttaccaaccttaccgggtggtcgtgctgagcttcgaattgcttcatgccccagccaccgtgtgtg
ggccataatga (SEQ ID NO: 77)
ggauccgccaccauggacuggaccuggauucuguuccugguggccgccgccacaagggugcacagcaugcagaucuacg
aaggaaaacugaccgcugagggacugagguucggaauugucgcaagccgcgcgaaucacgcacugguggauaggcuggu
ggaaggcgcuaucgacgcaauuguccggcacggcgggagagaggaagacaucacacuggugagagucugcggcagcugg
gagauucccguggcagcuggagaacuggcucgaaaggaggacaucgaugccgugaucgcuauugggguccugugccgag
gagcaacucccagcuucgacuacaucgccucagaagugagcaaggggcuggcugaucugucccuggagcugaggaaacc
uaucacuuuuggcgugauuacugccgacacccuggaacaggcaaucgaggcggccggcaccugccauggaaacaaaggcu
gggaagcagcccugugcgcuauugagauggcaaaucuguucaaaucucugcgaggaggcuccggaggaucuggagggag
uggaggcucaggaggaggcaaucugugcccuuucggugaggucuuuaaugcaacaagauuugcaaguguuuacgccug
gaaccguaagcgcauuagcaacugcacugccgauuacucugugcuguacaacagcacaagcuuuuccacauuuaaauguu
acgggguuuccccuaccaaccucagcgaccucugcuuuacuaauguuuacgcagauuccuucguuauccgaggcgauga
aguccggcagauagcucccggacagaccggcaaaaucgcugacuacaacuauaaacugccgaacgacagcacagggugug
uaauugcuuggaacagcaauaaccucgauucaaagguuggcggaaauuacaauuaucuuuaccgucuguuccggaaaag
caaucugaaacccuuugagagagacaucagcacggaaauuuaucaagccgguucaacaccauguaacggaguugaaggcu
uuaauugcuauuuuccccugcaaucuuacggauuucaaccuacgaacggggucgguuaccaaccuuaccggguggucgu
gcugagcuucgaauugcuucaugccccagccaccgugugugggccauaauga (SEQ ID NO: 78)
MDWTWILFLVAAATRVHSMQIYEGKLTAEGLRFGIVASRANHALVDRLVEGAIDAI
VRHGGREEDITLVRVCGSWEIPVAAGELARKEDIDAVIAIGVLCRGATPSFDYIASEV
SKGLADLSLELRKPITFGVITADTLEQAIEAAGTCHGNKGWEAALCAIEMANLFKSLR
GGSGGSGGSGGSGGGNLCPFGEVFNATRFASVYAWNRKRISNCTADYSVLYNSTSFS
TFKCYGVSPTNLSDLCFTNVYADSFVIRGDEVRQIAPGQTGKIADYNYKLPNDSTGC
VIAWNSNNLDSKVGGNYNYLYRLFRKSNLKPFERDISTEIYQAGSTPCNGVEGFNCY
FPLQSYGFQPTNGVGYQPYRVVVLSFELLHAPATVCGP** (SEQ ID NO: 79)
CoV2-RBD_7 mer_pVax
ggatccgccaccatggactggacctggattctgttcctggtggccgccgccacaagggtgcacagcaatctctgtccattcggagagg
ttttcaacgcgacgagattcgcctcagtttatgcctggaaccgtaaacggatatcaaactgcgtggctgactactctgttttatacaactcc
gcctctttcagtaccttcaagtgttacggtgtcagccctaccaaattgaatgatctctgctttacaaatgtttacgcagattcttttgtcataag
gggcgatgaggttcggcaaatcgcccccgggcagacaggcaaaattgcggactataattataagttgccagacgatttcacgggctg
cgtcatcgcctggaacagtaataatctcgattcaaaagtgggtgggaactacaattatctctacaggttattccggaagtcaaatctgaag
cccttcgaacgcgacatcagtacggagatttaccaggctggaagcactccgtgcaacggggtggaggggttcaactgttattttcctct
gcagtcttatgggtttcagcccactaatggtgtgggataccagccgtacagagtcgtggtgctgtccttcgaacttctccacgctcccgc
caccgtctgtggtcccgggggatctggcggatcagggggtagtggaggtagcggcggcgggaagaaacagggagacgctgacgt
ctgtggggaagtggcttacatccagagcgtggtgtctgattgccatgtaccaaccgcggagctcaggactcttttagagattcggaaac
tgtttctggagatccaaaagctgaaggtcgaactccagggcctgtcaaaagaatgataa (SEQ ID NO: 80)
ggauccgccaccauggacuggaccuggauucuguuccugguggccgccgccacaagggugcacagcaaucucuguccau
ucggagagguuuucaacgcgacgagauucgccucaguuuaugccuggaaccguaaacggauaucaaacugcguggcuga
cuacucuguuuuauacaacuccgccucuuucaguaccuucaaguguuacggugucagcccuaccaaauugaaugaucuc
ugcuuuacaaauguuuacgcagauucuuuugucauaaggggcgaugagguucggcaaaucgcccccgggcagacaggca
aaauugcggacuauaauuauaaguugccagacgauuucacgggcugcgucaucgccuggaacaguaauaaucucgauuc
aaaagugggugggaacuacaauuaucucuacagguuauuccggaagucaaaucugaagcccuucgaacgcgacaucagua
cggagauuuaccaggcuggaagcacuccgugcaacgggguggagggguucaacuguuauuuuccucugcagucuuaug
gguuucagcccacuaauggugugggauaccagccguacagagucguggugcuguccuucgaacuucuccacgcucccgc
caccgucuguggucccgggggaucuggcggaucaggggguaguggagguagcggcggcgggaagaaacagggagacgc
ugacgucuguggggaaguggcuuacauccagagcguggugucugauugccauguaccaaccgcggagcucaggacucuu
uuagagauucggaaacuguuucuggagauccaaaagcugaaggucgaacuccagggccugucaaaagaaugauaa
(SEQ ID NO: 81)
NLCPFGEVFNATRFASVYAWNRKRISNCVADYSVLYNSASFSTFKCYGVSPTKLNDL
CFTNVYADSFVIRGDEVRQIAPGQTGKIADYNYKLPDDFTGCVIAWNSNNLDSKVGG
NYNYLYRLFRKSNLKPFERDISTEIYQAGSTPCNGVEGFNCYFPLQSYGFQPTNGVGY
QPYRVVVLSFELLHAPATVCGPGGSGGSGGSGGSGGGKKQGDADVCGEVAYIQSVV
SDCHVPTAELRTLLEIRKLFLEIQKLKVELQGLSKE** (SEQ ID NO: 82)
CoV2-RBD_gmax_14 mer_pVax
ggatccgccaccatggactggacctggattctgttcctggtggccgccgccacaagggtgcacagcaatctgtgtcccttcggggag
gttttcaatgctaccagatttgccagtgtgtatgcttggaatcggaagagaatctccaattgcacagcagattattcagttctctacaactct
acatcttttagtacctttaagtgttacggggtgagtcccactaacctttcagatttatgtttcaccaatgtctacgctgactccttcgtgatccg
gggggatgaggtgagacagattgcacctggacaaactggcaaaatcgccgactacaattacaaacttccaaacgactctacagggtg
tgtaatcgcttggaacagcaataatctggatagcaaagtaggcggcaattataattacctctacagactgtttaggaagtccaacctgaa
accatttgagagggacatcagcactgaaatctaccaggcggggagcaccccttgtaatggagtcgagggtttcaactgttacttcccac
tgcagagctacgggttccagcctaccaatggtgtcggttaccagccctatcgagttgtggtgttgtcattcgaactgttacatgcacctgc
aacggtctgtggacccgggggttcagggggtagtggggggtccggtgggagcggtgggggcaagaaacaggggatgaatccgct
catcgccgccgcctctgtgatagctgctggcctggccgtgggcctggcatcaatcgggcccggggtgggccaaggcaccgccgcc
ggccaggccgtcgagggtattgcaaggcagccggaggcagaaggcaaaattagagggaccctgttgttgtctttagcgttcatggaa
gccctcactatttacggactggttgtggccttagcccttctgtttgccaatcctttcgtgtaatga (SEQ ID NO: 83)
ggauccgccaccauggacuggaccuggauucuguuccugguggccgccgccacaagggugcacagcaaucugugucccu
ucggggagguuuucaaugcuaccagauuugccaguguguaugcuuggaaucggaagagaaucuccaauugcacagcaga
uuauucaguucucuacaacucuacaucuuuuaguaccuuuaaguguuacggggugagucccacuaaccuuucagauuua
uguuucaccaaugucuacgcugacuccuucgugauccggggggaugaggugagacagauugcaccuggacaaacuggca
aaaucgccgacuacaauuacaaacuuccaaacgacucuacaggguguguaaucgcuuggaacagcaauaaucuggauagc
aaaguaggcggcaauuauaauuaccucuacagacuguuuaggaaguccaaccugaaaccauuugagagggacaucagcac
ugaaaucuaccaggcggggagcaccccuuguaauggagucgaggguuucaacuguuacuucccacugcagagcuacggg
uuccagccuaccaauggugucgguuaccagcccuaucgaguugugguguugucauucgaacuguuacaugcaccugcaa
cggucuguggacccggggguucaggggguagugggggguccggugggagcggugggggcaagaaacaggggaugaauc
cgcucaucgccgccgccucugugauagcugcuggccuggccgugggccuggcaucaaucgggcccggggugggccaagg
caccgccgccggccaggccgucgaggguauugcaaggcagccggaggcagaaggcaaaauuagagggacccuguuguug
ucuuuagcguucauggaagcccucacuauuuacggacugguuguggccuuagcccuucuguuugccaauccuuucgug
uaauga (SEQ ID NO: 84)
NLCPFGEVFNATRFASVYAWNRKRISNCTADYSVLYNSTSFSTFKCYGVSPTNLSDL
CFTNVYADSFVIRGDEVRQIAPGQTGKIADYNYKLPNDSTGCVIAWNSNNLDSKVGG
NYNYLYRLFRKSNLKPFERDISTEIYQAGSTPCNGVEGFNCYFPLQSYGFQPTNGVGY
QPYRVVVLSFELLHAPATVCGPGGSGGSGGSGGSGGGKKQGMNPLIAAASVIAAGL
AVGLASIGPGVGQGTAAGQAVEGIARQPEAEGKIRGTLLLSLAFMEALTIYGLVVAL
ALLFANPFV** (SEQ ID NO: 85)
CoV2-RBD_gmax_24 mer_pVax
ggatccgccaccatggactggacctggattctgttcctggtggccgccgccacaagggtgcacagcaacctgtgccccttcggggaa
gtttttaatgccactcggtttgcctccgtttacgcctggaacaggaagcgcatttccaactgcaccgccgactatagcgtcctttataacag
cacatccttttcaactttcaagtgttacggggtttcccctacaaatctctctgacctgtgttttacaaatgtgtatgcagactctttcgtgattag
gggagatgaggtgcgccagatcgcccctggacagaccggaaaaatcgccgattataattataagcttcccaacgactccacaggctg
tgtaattgcctggaattctaataacctggactctaaagtgggcggtaactacaattatctgtatagactcttcagaaagtctaacctcaaac
catttgaacgggacatctcaaccgagatctaccaagccgggtccaccccctgtaacggcgtggaaggcttcaactgttatttccccctc
cagtcctatggcttccaacccacaaatggagtcggctaccagccttacagggtggttgtgctgtcatttgagctcctccacgctcctgcc
actgtatgtgggccaggcgggtccggaggttcaggcggtagcggcggctcaggtggaggaggactgtctaaagatattataaaactg
ctgaacgaacaagtgaacaaggagatgcagagcagcaacctttacatgtctatgagcagttggtgttacactcactctctcgacggcgc
cggcctgttcctgtttgatcacgccgcggaggagtatgaacatgctaaaaagcttatcatcttcctcaacgaaaataacgtgccagtgca
gttgacctctatttccgctcccgaacataagttcgaaggcctcacacagatctttcagaaggcttacgagcatgaacaacacatttcaga
gagcatcaacaacatcgtggaccatgcgatcaagtctaaggaccacgcgacttttaacttcctccagtggtatgtcgccgaacagcatg
aggaggaagtgttgttcaaagacatcctggacaagattgaacttattggcaacgaaaaccacggcctctacctggccgatcagtacgt
gaaaggtatcgcgaagtcacgaaagagttaatga (SEQ ID NO: 86)
ggauccgccaccauggacuggaccuggauucuguuccugguggccgccgccacaagggugcacagcaaccugugccccu
ucggggaaguuuuuaaugccacucgguuugccuccguuuacgccuggaacaggaagcgcauuuccaacugcaccgccga
cuauagcguccuuuauaacagcacauccuuuucaacuuucaaguguuacgggguuuccccuacaaaucucucugaccug
uguuuuacaaauguguaugcagacucuuucgugauuaggggagaugaggugcgccagaucgccccuggacagaccggaa
aaaucgccgauuauaauuauaagcuucccaacgacuccacaggcuguguaauugccuggaauucuaauaaccuggacucu
aaagugggcgguaacuacaauuaucuguauagacucuucagaaagucuaaccucaaaccauuugaacgggacaucucaac
cgagaucuaccaagccggguccacccccuguaacggcguggaaggcuucaacuguuauuucccccuccaguccuauggcu
uccaacccacaaauggagucggcuaccagccuuacagggugguugugcugucauuugagcuccuccacgcuccugccac
uguaugugggccaggcggguccggagguucaggcgguagcggcggcucagguggaggaggacugucuaaagauauuau
aaaacugcugaacgaacaagugaacaaggagaugcagagcagcaaccuuuacaugucuaugagcaguugguguuacacuc
acucucucgacggcgccggccuguuccuguuugaucacgccgcggaggaguaugaacaugcuaaaaagcuuaucaucuu
ccucaacgaaaauaacgugccagugcaguugaccucuauuuccgcucccgaacauaaguucgaaggccucacacagaucu
uucagaaggcuuacgagcaugaacaacacauuucagagagcaucaacaacaucguggaccaugcgaucaagucuaaggac
cacgcgacuuuuaacuuccuccagugguaugucgccgaacagcaugaggaggaaguguuguucaaagacauccuggaca
agauugaacuuauuggcaacgaaaaccacggccucuaccuggccgaucaguacgugaaagguaucgcgaagucacgaaag
aguuaauga (SEQ ID NO: 87)
NLCPFGEVFNATRFASVYAWNRKRISNCTADYSVLYNSTSFSTFKCYGVSPTNLSDL
CFTNVYADSFVIRGDEVRQIAPGQTGKIADYNYKLPNDSTGCVIAWNSNNLDSKVGG
NYNYLYRLFRKSNLKPFERDISTEIYQAGSTPCNGVEGFNCYFPLQSYGFQPTNGVGY
QPYRVVVLSFELLHAPATVCGPGGSGGSGGSGGSGGGGLSKDIIKLLNEQVNKEMQS
SNLYMSMSSWCYTHSLDGAGLFLFDHAAEEYEHAKKLIIFLNENNVPVQLTSISAPE
HKFEGLTQIFQKAYEHEQHISESINNIVDHAIKSKDHATFNFLQWYVAEQHEEEVLFK
DILDKIELIGNENHGLYLADQYVKGIAKSRKS** (SEQ ID NO: 88)
CoV2-RBD_gmax_7 mer_pVax
ggatccgccaccatggactggacctggattctgttcctggtggccgccgccacaagggtgcacagcaatctttgtccattcggggaag
tgtttaacgccactaggttcgctagtgtgtacgcctggaatcggaagcggatttcaaattgtaccgccgattattctgtcctttacaacagt
accagcttttccacttttaaatgctacggagtatctcctacaaacttgagtgacctgtgttttacgaacgtctacgctgactctttcgttattag
gggagacgaagttagacaaatcgctccaggccagactggcaaaatagccgactataactataaactcccaaacgattccacaggctg
cgttattgcctggaacagcaataacctggactctaaagtcggaggtaactataactacttgtacaggctcttccgcaagagcaaccttaa
gccatttgagcgagatatctccaccgagatttatcaggcagggagcaccccatgcaacggagtggaggggtttaattgctattttccact
gcagtcctatggctttcaaccaacaaacggagtaggctaccaaccgtatcgcgttgtcgtcctgagtttcgaactgttgcacgcccctgc
gaccgtatgtggccccggcggctcaggggggagtggtgggagcgggggctctgggggggggaaaaaacagggggacgccgat
gtttgcggcgaggtggcctatatacagtcagtggtctccgactgtcatgtaccaactgccgaactcaggactcttctggagataaggaa
gttgttcctggagatacagaagctcaaggtcgagttacagggtctctcaaaggaatgatga (SEQ ID NO: 89)
ggauccgccaccauggacuggaccuggauucuguuccugguggccgccgccacaagggugcacagcaaucuuuguccau
ucggggaaguguuuaacgccacuagguucgcuaguguguacgccuggaaucggaagcggauuucaaauuguaccgccga
uuauucuguccuuuacaacaguaccagcuuuuccacuuuuaaaugcuacggaguaucuccuacaaacuugagugaccug
uguuuuacgaacgucuacgcugacucuuucguuauuaggggagacgaaguuagacaaaucgcuccaggccagacuggca
aaauagccgacuauaacuauaaacucccaaacgauuccacaggcugcguuauugccuggaacagcaauaaccuggacucu
aaagucggagguaacuauaacuacuuguacaggcucuuccgcaagagcaaccuuaagccauuugagcgagauaucuccac
cgagauuuaucaggcagggagcaccccaugcaacggaguggagggguuuaauugcuauuuuccacugcaguccuauggc
uuucaaccaacaaacggaguaggcuaccaaccguaucgcguugucguccugaguuucgaacuguugcacgccccugcgac
cguauguggccccggcggcucaggggggaguggugggagcgggggcucugggggggggaaaaaacagggggacgccga
uguuugcggcgagguggccuauauacagucaguggucuccgacugucauguaccaacugccgaacucaggacucuucug
gagauaaggaaguuguuccuggagauacagaagcucaaggucgaguuacagggucucucaaaggaaugauga (SEQ
ID NO: 90)
NLCPFGEVFNATRFASVYAWNRKRISNCTADYSVLYNSTSFSTFKCYGVSPTNLSDL
CFTNVYADSFVIRGDEVRQIAPGQTGKIADYNYKLPNDSTGCVIAWNSNNLDSKVGG
NYNYLYRLFRKSNLKPFERDISTEIYQAGSTPCNGVEGFNCYFPLQSYGFQPTNGVGY
QPYRVVVLSFELLHAPATVCGPGGSGGSGGSGGSGGGKKQGDADVCGEVAYIQSVV
SDCHVPTAELRTLLEIRKLFLEIQKLKVELQGLSKE** (SEQ ID NO: 91)
II. CoV2 Trimer Constructs
WuhanS_SolTri_FS1_pVax
ggatccgccaccatggactggacctggattctgttcctggtggccgccgccacaagggtgcacagcatgtttgttttcctcgtcctcttg
cccctcgtctctagtcaatgtgttaatttgaccacacgaacccaactgccacctgcctacaccaacagttttaccagaggagtttattaccc
cgacaaagtattcaggtcatcagtgctgcatagtacccaagacttgtttctccccttctttagtaacgttacatggttccacgccattcacgt
gagtgggacaaatggaacaaaacgcttcgacaaccctgtgctccccttcaacgatggtgtatactttgctagtaccgagaagagcgga
attatccgcgggtggatctttggaacaacactggacagcaaaacccaaagcctgcttatcgttaacaatgctactaacgttgtgatcaaa
gtgtgtgaattccaattttgtaatgatccgtttctcggagtttactaccacaagaacaacaaaagttggatggaaagcgaattccgggtgta
ctcctcagcaaataattgtacctttgagtacgtgagtcaaccctttctcatggacctggaaggaaaacaaggcaatttcaagaacctgcg
ggagtttgtgttcaagaatattgatggctattttaaaatttattctaagcatactccaatcaacctggtaagggacctgccccaaggcttttca
gccctcgaaccgcttgtagatttgcctatcgggataaacattacgcgatttcaaacgctgttggcgctccaccggagctacttgactcctg
gcgatagcagctccggttggaccgctggagcggccgcttattacgtcggctatctgcaacccaggacgttcctgctcaagtataatga
gaacgggacgattacagatgcagtggattgtgcgcttgatcctctctctgaaaccaagtgcactctcaagtctttcacggtggagaaag
gcatttatcaaactagtaactttcgagtacagcctactgagagtatcgttaggttcccaaacattacgaacctctgtccctttggagaagtat
tcaatgctactcgctttgcaagcgtttatgcctggaatcgcaaacgcatcagcaattgcgtcgccgattattctgtcctttataatagcgcat
cattttcaacatttaagtgttatggggtgagtccgactaagctcaatgatttgtgcttcacaaacgtctacgcggacagctttgtgataagg
ggcgacgaagttcgccaaatcgctcccggccaaactgggaaaatcgcggattacaactataaattgcccgatgacttcaccggctgtg
tcattgcctggaactctaataacctcgatagcaaggtgggcgggaactataattatttgtaccgcctgtttcgaaagtccaatctcaaacc
ctttgagcgggacatttccactgagatctatcaggcagggagtacaccttgtaacggcgtggaaggctttaactgttattttcccctgcaa
agttacggttttcaacctaccaacggagttggctatcaaccttatcgagtcgtcgtgctgagttttgagttgctgcatgccccagccaccgt
ctgtggacctaagaaatccaccaacctcgtgaagaacaagtgcgtcaattttaattttaacggcctgactgggaccggtgtcctcaccga
atctaataagaagttcctgccatttcaacaattcggacgggacatcgctggaacgacagatgctgtccgtgatcctcagacactggaga
ttctggacatcactccttgcagctttggcggagtctctgttattactcccggaactaacacttctaaccaagttgctgtcctctatcaggacg
tgaactgcactgaagtgcccgtggcaatccatgcaggccaactgacccccacttggagagtctacagcacggggagcaatgtcttcc
aaacaagggccggatgccttattggagcggagcacgttaataactcatacgagtgtgatataccaattggagcaggaatttgtgcttcct
accagacccaaactaacagtcccaggcgggctaggagtgtcgctagccagagcatcatcgcgtacacaatgtctctcggcgcagaa
aactcagtcgcctatagcaacaactcaattgccattcccaccaacttcacaatttccgtaaccactgaaattctgcctgttagcatgacaaa
gacatcagttgattgtacaatgtacatatgtggagacagcaccgaatgcagcaaccttttgcttcaatatggctccttttgtacccaactca
acagggcactcactgggatagcagtcgaacaagataagaacacccaagaggtgtttgcacaagtcaaacaaatctataaaacgccgc
ccataaaagactttggcggattcaatttcagccagatcttgcctgacccatccaagccttcaaagaggagctttattgaggatcttctcttc
aataaagtgacactggcggacgccggttttatcaagcaatatggtgattgtctcggtgacatagcagctagagatctgatttgcgctcag
aaatttaatggccttactgtgcttcccccactgctgaccgatgaaatgattgcacaatatacaagcgcccttttggccgggactattacttc
cgggtggaccttcggcgccggcgccgctctgcaaattcctttcgcaatgcagatggcctaccggttcaatggcataggtgtcactcag
aacgttctttatgagaatcagaaactcatcgcgaaccagtttaattcagcgatcggcaagattcaggactccttgtcctcaactgcgtcag
ctttgggaaaacttcaagacgtcgtgaaccagaatgctcaggcgctcaataccctggtgaaacaacttagcagtaactttggggctattt
ctagcggtccaaacgatatactgtcccgactcccgaaagtcgaggccgaagtccaaattgatcgtcttattacagggagactccaatct
cttcaaacatatgtcactcaacagctcattagggctgcggagatccgggcttccgcaaatcttgccgcgacaaagatgagtgaatgcgt
cttgggacaatctaagagggtggacttttgtggaaaaggttaccatctcatgtccttccctcagtcagcgccccacggagtcgttttcctg
cacgtaacgtatgtcccggctcaagagaagaacttcactactgcaccagcgatttgccatgacggtaaagcccattttccccgcgagg
gcgtatttgtgtccaacggtacccactggttcgtaacccaacggaatttctatgagccccaaatcattacaacagataatacagatgtttcc
gggaattgcgacgttgttattggcatcgttaacaacaccgtttacgatcccttgcaaccggaactggactcctttaaagaagaactcgac
aagtattttaagaaccacacatcaccagatgtcgatcttggcgacatttccggcattaacgcttcagttgtaaatattcagaaagagatag
atcgcctgaatgaggtggctaagaacctgaacgaatctctcattgatctccaagagctgggaaagtacgaacaatacatcaaatggcct
tctgggcgtcgccgaagacgacgagggtccggcggctcagggagcggctatatccctgaggcgcctcgggacggacaagcttatg
tgaggaaagatggagaatgggtattgctgtcaaccttcctgggataatga (SEQ ID NO: 92)
ggauccgccaccauggacuggaccuggauucuguuccugguggccgccgccacaagggugcacagcauguuuguuuucc
ucguccucuugccccucgucucuagucaauguguuaauuugaccacacgaacccaacugccaccugccuacaccaacagu
uuuaccagaggaguuuauuaccccgacaaaguauucaggucaucagugcugcauaguacccaagacuuguuucuccccu
ucuuuaguaacguuacaugguuccacgccauucacgugagugggacaaauggaacaaaacgcuucgacaacccugugcuc
cccuucaacgaugguguauacuuugcuaguaccgagaagagcggaauuauccgcggguggaucuuuggaacaacacugg
acagcaaaacccaaagccugcuuaucguuaacaaugcuacuaacguugugaucaaagugugugaauuccaauuuuguaau
gauccguuucucggaguuuacuaccacaagaacaacaaaaguuggauggaaagcgaauuccggguguacuccucagcaaa
uaauuguaccuuugaguacgugagucaacccuuucucauggaccuggaaggaaaacaaggcaauuucaagaaccugcgg
gaguuuguguucaagaauauugauggcuauuuuaaaauuuauucuaagcauacuccaaucaaccugguaagggaccugc
cccaaggcuuuucagcccucgaaccgcuuguagauuugccuaucgggauaaacauuacgcgauuucaaacgcuguuggc
gcuccaccggagcuacuugacuccuggcgauagcagcuccgguuggaccgcuggagcggccgcuuauuacgucggcuau
cugcaacccaggacguuccugcucaaguauaaugagaacgggacgauuacagaugcaguggauugugcgcuugauccuc
ucucugaaaccaagugcacucucaagucuuucacgguggagaaaggcauuuaucaaacuaguaacuuucgaguacagccu
acugagaguaucguuagguucccaaacauuacgaaccucugucccuuuggagaaguauucaaugcuacucgcuuugcaa
gcguuuaugccuggaaucgcaaacgcaucagcaauugcgucgccgauuauucuguccuuuauaauagcgcaucauuuuc
aacauuuaaguguuauggggugaguccgacuaagcucaaugauuugugcuucacaaacgucuacgcggacagcuuugug
auaaggggcgacgaaguucgccaaaucgcucccggccaaacugggaaaaucgcggauuacaacuauaaauugcccgauga
cuucaccggcugugucauugccuggaacucuaauaaccucgauagcaaggugggcgggaacuauaauuauuuguaccgc
cuguuucgaaaguccaaucucaaacccuuugagcgggacauuuccacugagaucuaucaggcagggaguacaccuugua
acggcguggaaggcuuuaacuguuauuuuccccugcaaaguuacgguuuucaaccuaccaacggaguuggcuaucaacc
uuaucgagucgucgugcugaguuuugaguugcugcaugccccagccaccgucuguggaccuaagaaauccaccaaccuc
gugaagaacaagugcgucaauuuuaauuuuaacggccugacugggaccgguguccucaccgaaucuaauaagaaguucc
ugccauuucaacaauucggacgggacaucgcuggaacgacagaugcuguccgugauccucagacacuggagauucugga
caucacuccuugcagcuuuggcggagucucuguuauuacucccggaacuaacacuucuaaccaaguugcuguccucuau
caggacgugaacugcacugaagugcccguggcaauccaugcaggccaacugacccccacuuggagagucuacagcacggg
gagcaaugucuuccaaacaagggccggaugccuuauuggagcggagcacguuaauaacucauacgagugugauauacca
auuggagcaggaauuugugcuuccuaccagacccaaacuaacagucccaggcgggcuaggagugucgcuagccagagca
ucaucgcguacacaaugucucucggcgcagaaaacucagucgccuauagcaacaacucaauugccauucccaccaacuuca
caauuuccguaaccacugaaauucugccuguuagcaugacaaagacaucaguugauuguacaauguacauauguggaga
cagcaccgaaugcagcaaccuuuugcuucaauauggcuccuuuuguacccaacucaacagggcacucacugggauagcag
ucgaacaagauaagaacacccaagagguguuugcacaagucaaacaaaucuauaaaacgccgcccauaaaagacuuuggcg
gauucaauuucagccagaucuugccugacccauccaagccuucaaagaggagcuuuauugaggaucuucucuucaauaaa
gugacacuggcggacgccgguuuuaucaagcaauauggugauugucucggugacauagcagcuagagaucugauuugc
gcucagaaauuuaauggccuuacugugcuucccccacugcugaccgaugaaaugauugcacaauauacaagcgcccuuuu
ggccgggacuauuacuuccggguggaccuucggcgccggcgccgcucugcaaauuccuuucgcaaugcagauggccuac
cgguucaauggcauaggugucacucagaacguucuuuaugagaaucagaaacucaucgcgaaccaguuuaauucagcga
ucggcaagauucaggacuccuuguccucaacugcgucagcuuugggaaaacuucaagacgucgugaaccagaaugcuca
ggcgcucaauacccuggugaaacaacuuagcaguaacuuuggggcuauuucuagcgguccaaacgauauacugucccga
cucccgaaagucgaggccgaaguccaaauugaucgucuuauuacagggagacuccaaucucuucaaacauaugucacuca
acagcucauuagggcugcggagauccgggcuuccgcaaaucuugccgcgacaaagaugagugaaugcgucuugggacaa
ucuaagaggguggacuuuuguggaaaagguuaccaucucauguccuucccucagucagcgccccacggagucguuuucc
ugcacguaacguaugucccggcucaagagaagaacuucacuacugcaccagcgauuugccaugacgguaaagcccauuuu
ccccgcgagggcguauuuguguccaacgguacccacugguucguaacccaacggaauuucuaugagccccaaaucauuac
aacagauaauacagauguuuccgggaauugcgacguuguuauuggcaucguuaacaacaccguuuacgaucccuugcaa
ccggaacuggacuccuuuaaagaagaacucgacaaguauuuuaagaaccacacaucaccagaugucgaucuuggcgacau
uuccggcauuaacgcuucaguuguaaauauucagaaagagauagaucgccugaaugagguggcuaagaaccugaacgaa
ucucucauugaucuccaagagcugggaaaguacgaacaauacaucaaauggccuucugggcgucgccgaagacgacgagg
guccggcggcucagggagcggcuauaucccugaggcgccucgggacggacaagcuuaugugaggaaagauggagaaugg
guauugcugucaaccuuccugggauaauga (SEQ ID NO: 93)
MDWTWILFLVAAATRVHSMFVFLVLLPLVSSQCVNLTTRTQLPPAYTNSFTRGVYY
PDKVFRSSVLHSTQDLFLPFFSNVTWFHAIHVSGTNGTKRFDNPVLPFNDGVYFASTE
KSGIIRGWIFGTTLDSKTQSLLIVNNATNVVIKVCEFQFCNDPFLGVYYHKNNKSWM
ESEFRVYSSANNCTFEYVSQPFLMDLEGKQGNFKNLREFVFKNIDGYFKIYSKHTPIN
LVRDLPQGFSALEPLVDLPIGINITRFQTLLALHRSYLTPGDSSSGWTAGAAAYYVGY
LQPRTFLLKYNENGTITDAVDCALDPLSETKCTLKSFTVEKGIYQTSNFRVQPTESIVR
FPNITNLCPFGEVFNATRFASVYAWNRKRISNCVADYSVLYNSASFSTFKCYGVSPTK
LNDLCFTNVYADSFVIRGDEVRQIAPGQTGKIADYNYKLPDDFTGCVIAWNSNNLDS
KVGGNYNYLYRLFRKSNLKPFERDISTEIYQAGSTPCNGVEGFNCYFPLQSYGFQPTN
GVGYQPYRVVVLSFELLHAPATVCGPKKSTNLVKNKCVNFNFNGLTGTGVLTESNK
KFLPFQQFGRDIAGTTDAVRDPQTLEILDITPCSFGGVSVITPGTNTSNQVAVLYQDV
NCTEVPVAIHAGQLTPTWRVYSTGSNVFQTRAGCLIGAEHVNNSYECDIPIGAGICAS
YQTQTNSPRRARSVASQSIIAYTMSLGAENSVAYSNNSIAIPTNFTISVTTEILPVSMTK
TSVDCTMYICGDSTECSNLLLQYGSFCTQLNRALTGIAVEQDKNTQEVFAQVKQIYK
TPPIKDFGGFNFSQILPDPSKPSKRSFIEDLLFNKVTLADAGFIKQYGDCLGDIAARDLI
CAQKFNGLTVLPPLLTDEMIAQYTSALLAGTITSGWTFGAGAALQIPFAMQMAYRFN
GIGVTQNVLYENQKLIANQFNSAIGKIQDSLSSTASALGKLQDVVNQNAQALNTLVK
QLSSNFGAISSGPNDILSRLPKVEAEVQIDRLITGRLQSLQTYVTQQLIRAAEIRASANL
AATKMSECVLGQSKRVDFCGKGYHLMSFPQSAPHGVVFLHVTYVPAQEKNFTTAPA
ICHDGKAHFPREGVFVSNGTHWFVTQRNFYEPQIITTDNTDVSGNCDVVIGIVNNTV
YDPLQPELDSFKEELDKYFKNHTSPDVDLGDISGINASVVNIQKEIDRLNEVAKNLNE
SLIDLQELGKYEQYIKWPSGRRRRRRGSGGSGSGYIPEAPRDGQAYVRKDGEWVLLS
TFLG** (SEQ ID NO: 94)
WuS_IgE_StrepHis_pVax
gccaccatggactggacctggatactctttctcgtagcagcagccacacgagtgcattcaagccaatgcgtgaatctgactacaagga
ctcagctgccccctgcatacacgaacagtttcacccgcggtgtatattatccggacaaagtattcaggtctagtgtgctgcactcaaccc
aggatttgtttctgcccttcttctctaacgtgacatggttccacgccatccatgtgtcaggtacgaacggtaccaagagatttgataacccg
gtactgccatttaatgacggcgtctattttgcttccactgagaagagcaacatcataagaggctggatctttggaactactctggacagca
aaacccagagcttgctgatcgtgaacaacgcgacaaatgtagtgatcaaagtatgtgagtttcaattctgtaacgatcccttccttggggt
ttattaccataagaataataagagttggatggagtccgaatttagagtttactcctcagctaataactgtacgttcgagtatgtctcccaacc
ttttcttatggatctcgaagggaaacagggtaactttaagaatcttcgagaatttgtgttcaagaacatcgacggttattttaagatctacagt
aagcatactcccataaatctggttagagatctcccgcaaggattttccgcactggagccccttgtagaccttcccattggaataaacataa
cacgtttccagacactcctcgctctgcataggtcatatctcaccccgggcgattcttccagcggatggaccgctggagctgctgcttact
acgtaggatacctgcaaccccggacatttctgctcaagtataacgaaaatgggactattacggacgctgtggactgtgctcttgaccca
cttagcgagacaaaatgcacgctgaaaagttttaccgtggagaaggggatctatcaaacgagcaattttagggttcagcctaccgaatc
aatcgtcagatttcccaatatcactaacctgtgccctttcggggaagttttcaacgcaacccggtttgcgagcgtatacgcttggaatcgc
aaaaggataagcaattgcgttgccgattactccgttctttacaattcagcatcattttctacttttaaatgctacggcgtgtctcccacaaaac
tgaatgacctgtgttttacgaacgtgtatgcagacagctttgtgattaggggtgatgaggttagacaaatcgcaccaggtcagaccggta
agatcgctgattacaactacaaactgcccgatgacttcacaggatgcgtgattgcctggaattccaacaatctggattctaaggttggcg
gcaattacaattacctgtataggttgtttcggaagtcaaacctgaaacccttcgaaagagacatttctaccgagatttatcaagcgggttca
actccttgtaatggagttgaaggcttcaattgttactttccccttcaatcatacggattccaaccaaccaatggggtcggataccagccata
tagggttgttgtcctgtcattcgaacttctccacgcaccagccaccgtatgtggacccaagaagtctactaatctggtgaagaacaaatg
cgtcaatttcaactttaatgggttgaccggcactggggtgctgactgaatccaacaagaagtttctgccgttccaacaattcggacgcga
tatcgctgatacaaccgatgccgttagagatccccaaacattggagattctggatattacgccttgttcattcggtggtgtttccgtgattac
ccctggcaccaatacgagtaaccaagtggcggtgctgtatcaagatgtgaactgtactgaagtgccggtggctatacatgccgaccaa
ctcacaccaacatggagagtatatagcacgggttccaatgtgtttcaaactagggctggctgtttgattggcgctgaacatgttaataattc
ctatgaatgcgatattcccatcggtgccgggatttgcgcaagttatcaaacgcaaactaactcccccgggtcagcatcctctgtcgcttc
ccaatcaatcatcgcctataccatgagtcttggggcagaaaattccgttgcttattctaacaattccattgcaattcctacgaacttcaccat
ctcagttactacagaaatacttcccgtgtcaatgacgaagacatccgtagattgcacaatgtatatatgtggggactcaactgaatgctca
aacctgctcctgcaatacggatcattttgcacccaactgaacagagcattgaccggtatagccgtggagcaagataagaacactcaag
aagtattcgcccaggtcaaacaaatctataaaactccgcctataaaagattttggcggctttaacttttcccaaatactgcctgacccaagt
aagccctcaaaacgtagctttatagaggacctcttgtttaataaggtgacactcgctgacgctggattcattaagcaatatggtgactgctt
gggagatattgccgcccgcgatctcatttgtgcacaaaagttcaacggcctcacagtcctgccccctctgctgacggatgaaatgatcg
ctcaatacacctcagctctcctggcaggcaccataacaagcgggtggacatttggtgccggggcagcactgcaaatcccattcgcaat
gcaaatggcttataggttcaatgggatcggcgtaactcaaaatgtcctctacgagaaccagaaactcatagctaaccaattcaattctgc
aatcgggaaaatccaggactccctgagctcaacggccagcgcactgggcaagctccaagatgtggtcaaccaaaacgcacaagca
ctgaatactcttgtgaaacaactcagctccaatttcggggcaatatcaagtgtcctcaatgatattcttagcaggcttgatccacccgaag
ccgaggtgcagatcgacaggctcataacaggcaggctccagtcccttcaaacgtatgtaactcagcaactgattcgggctgccgagat
tcgagcttcagctaatttggcagctacgaagatgagcgaatgcgtcctgggacagtctaaaagagtagacttttgcggcaaagggtatc
atctgatgagcttcccacaaagtgctccacatggcgtggttttcctgcatgtcacttatgttcccgcacaagagaagaacttcactaccgc
accagcgatctgtcacgatggtaaagcacatttcccgcgggaaggcgtattcgtatctaacggcacccactggttcgttactcaacgca
acttttatgaaccacaaatcattacaaccgataacacttttgtttcaggcaattgcgatgttgtcatcggcattgtgaataacactgtgtacg
atccacttcaaccagaattggacagctttaaagaggagcttgataagtatttcaagaatcatacctctcccgacgtggacctcggggaca
tctctggaataaatgctagcgtcgttaatatacagaaagagattgatcgtctgaacgaagtggctaagaatctgaatgaaagccttatcga
tctgcaagaactggggaagtacgaacagggatacataccggaagccccacgcgacggtcaggcttatgttaggaaggatggagaat
gggttttgctctccacgtttctcgggcttgaagttttgttccaaggaccctggtcacacccccaatttgagaaacaccatcaccaccatca
ccaccactgataa (SEQ ID NO: 95)
gccaccauggacuggaccuggauacucuuucucguagcagcagccacacgagugcauucaagccaaugcgugaaucugac
uacaaggacucagcugcccccugcauacacgaacaguuucacccgcgguguauauuauccggacaaaguauucaggucua
gugugcugcacucaacccaggauuuguuucugcccuucuucucuaacgugacaugguuccacgccauccaugugucagg
uacgaacgguaccaagagauuugauaacccgguacugccauuuaaugacggcgucuauuuugcuuccacugagaagagc
aacaucauaagaggcuggaucuuuggaacuacucuggacagcaaaacccagagcuugcugaucgugaacaacgcgacaaa
uguagugaucaaaguaugugaguuucaauucuguaacgaucccuuccuugggguuuauuaccauaagaauaauaagagu
uggauggaguccgaauuuagaguuuacuccucagcuaauaacuguacguucgaguaugucucccaaccuuuucuuaugg
aucucgaagggaaacaggguaacuuuaagaaucuucgagaauuuguguucaagaacaucgacgguuauuuuaagaucua
caguaagcauacucccauaaaucugguuagagaucucccgcaaggauuuuccgcacuggagccccuuguagaccuuccca
uuggaauaaacauaacacguuuccagacacuccucgcucugcauaggucauaucucaccccgggcgauucuuccagcgga
uggaccgcuggagcugcugcuuacuacguaggauaccugcaaccccggacauuucugcucaaguauaacgaaaauggga
cuauuacggacgcuguggacugugcucuugacccacuuagcgagacaaaaugcacgcugaaaaguuuuaccguggagaa
ggggaucuaucaaacgagcaauuuuaggguucagccuaccgaaucaaucgucagauuucccaauaucacuaaccugugcc
cuuucggggaaguuuucaacgcaacccgguuugcgagcguauacgcuuggaaucgcaaaaggauaagcaauugcguugc
cgauuacuccguucuuuacaauucagcaucauuuucuacuuuuaaaugcuacggcgugucucccacaaaacugaaugacc
uguguuuuacgaacguguaugcagacagcuuugugauuaggggugaugagguuagacaaaucgcaccaggucagaccg
guaagaucgcugauuacaacuacaaacugcccgaugacuucacaggaugcgugauugccuggaauuccaacaaucuggau
ucuaagguuggcggcaauuacaauuaccuguauagguuguuucggaagucaaaccugaaacccuucgaaagagacauuu
cuaccgagauuuaucaagcggguucaacuccuuguaauggaguugaaggcuucaauuguuacuuuccccuucaaucaua
cggauuccaaccaaccaauggggucggauaccagccauauaggguuguuguccugucauucgaacuucuccacgcaccag
ccaccguauguggacccaagaagucuacuaaucuggugaagaacaaaugcgucaauuucaacuuuaauggguugaccgg
cacuggggugcugacugaauccaacaagaaguuucugccguuccaacaauucggacgcgauaucgcugauacaaccgaug
ccguuagagauccccaaacauuggagauucuggauauuacgccuuguucauucggugguguuuccgugauuaccccugg
caccaauacgaguaaccaaguggcggugcuguaucaagaugugaacuguacugaagugccgguggcuauacaugccgac
caacucacaccaacauggagaguauauagcacggguuccaauguguuucaaacuagggcuggcuguuugauuggcgcug
aacauguuaauaauuccuaugaaugcgauauucccaucggugccgggauuugcgcaaguuaucaaacgcaaacuaacucc
cccgggucagcauccucugucgcuucccaaucaaucaucgccuauaccaugagucuuggggcagaaaauuccguugcuu
auucuaacaauuccauugcaauuccuacgaacuucaccaucucaguuacuacagaaauacuucccgugucaaugacgaag
acauccguagauugcacaauguauauauguggggacucaacugaaugcucaaaccugcuccugcaauacggaucauuuu
gcacccaacugaacagagcauugaccgguauagccguggagcaagauaagaacacucaagaaguauucgcccaggucaaa
caaaucuauaaaacuccgccuauaaaagauuuuggcggcuuuaacuuuucccaaauacugccugacccaaguaagcccuc
aaaacguagcuuuauagaggaccucuuguuuaauaaggugacacucgcugacgcuggauucauuaagcaauauggugac
ugcuugggagauauugccgcccgcgaucucauuugugcacaaaaguucaacggccucacaguccugcccccucugcuga
cggaugaaaugaucgcucaauacaccucagcucuccuggcaggcaccauaacaagcggguggacauuuggugccggggc
agcacugcaaaucccauucgcaaugcaaauggcuuauagguucaaugggaucggcguaacucaaaauguccucuacgaga
accagaaacucauagcuaaccaauucaauucugcaaucgggaaaauccaggacucccugagcucaacggccagcgcacug
ggcaagcuccaagauguggucaaccaaaacgcacaagcacugaauacucuugugaaacaacucagcuccaauuucggggc
aauaucaaguguccucaaugauauucuuagcaggcuugauccacccgaagccgaggugcagaucgacaggcucauaacag
gcaggcuccagucccuucaaacguauguaacucagcaacugauucgggcugccgagauucgagcuucagcuaauuuggc
agcuacgaagaugagcgaaugcguccugggacagucuaaaagaguagacuuuugcggcaaaggguaucaucugaugagc
uucccacaaagugcuccacauggcgugguuuuccugcaugucacuuauguucccgcacaagagaagaacuucacuaccgc
accagcgaucugucacgaugguaaagcacauuucccgcgggaaggcguauucguaucuaacggcacccacugguucguu
acucaacgcaacuuuuaugaaccacaaaucauuacaaccgauaacacuuuuguuucaggcaauugcgauguugucaucgg
cauugugaauaacacuguguacgauccacuucaaccagaauuggacagcuuuaaagaggagcuugauaaguauuucaag
aaucauaccucucccgacguggaccucggggacaucucuggaauaaaugcuagcgucguuaauauacagaaagagauuga
ucgucugaacgaaguggcuaagaaucugaaugaaagccuuaucgaucugcaagaacuggggaaguacgaacagggauac
auaccggaagccccacgcgacggucaggcuuauguuaggaaggauggagaauggguuuugcucuccacguuucucgggc
uugaaguuuuguuccaaggacccuggucacacccccaauuugagaaacaccaucaccaccaucaccaccacugauaa
(SEQ ID NO: 96)
MDWTWILFLVAAATRVHSSQCVNLTTRTQLPPAYTNSFTRGVYYPDKVFRSSVLHS
TQDLFLPFFSNVTWFHAIHVSGTNGTKRFDNPVLPFNDGVYFASTEKSNIIRGWIFGT
TLDSKTQSLLIVNNATNVVIKVCEFQFCNDPFLGVYYHKNNKSWMESEFRVYSSAN
NCTFEYVSQPFLMDLEGKQGNFKNLREFVFKNIDGYFKIYSKHTPINLVRDLPQGFSA
LEPLVDLPIGINITRFQTLLALHRSYLTPGDSSSGWTAGAAAYYVGYLQPRTFLLKYN
ENGTITDAVDCALDPLSETKCTLKSFTVEKGIYQTSNFRVQPTESIVRFPNITNLCPFGE
VFNATRFASVYAWNRKRISNCVADYSVLYNSASFSTFKCYGVSPTKLNDLCFTNVY
ADSFVIRGDEVRQIAPGQTGKIADYNYKLPDDFTGCVIAWNSNNLDSKVGGNYNYL
YRLFRKSNLKPFERDISTEIYQAGSTPCNGVEGFNCYFPLQSYGFQPTNGVGYQPYRV
VVLSFELLHAPATVCGPKKSTNLVKNKCVNFNFNGLTGTGVLTESNKKFLPFQQFGR
DIADTTDAVRDPQTLEILDITPCSFGGVSVITPGTNTSNQVAVLYQDVNCTEVPVAIH
ADQLTPTWRVYSTGSNVFQTRAGCLIGAEHVNNSYECDIPIGAGICASYQTQTNSPGS
ASSVASQSIIAYTMSLGAENSVAYSNNSIAIPTNFTISVTTEILPVSMTKTSVDCTMYIC
GDSTECSNLLLQYGSFCTQLNRALTGIAVEQDKNTQEVFAQVKQIYKTPPIKDFGGFN
FSQILPDPSKPSKRSFIEDLLFNKVTLADAGFIKQYGDCLGDIAARDLICAQKFNGLTV
LPPLLTDEMIAQYTSALLAGTITSGWTFGAGAALQIPFAMQMAYRFNGIGVTQNVLY
ENQKLIANQFNSAIGKIQDSLSSTASALGKLQDVVNQNAQALNTLVKQLSSNFGAISS
VLNDILSRLD [symbol] EAEVQIDRLITGRLQSLQTYVTQQLIRAAEIRASANLAATKMSECVL
GQSKRVDFCGKGYHLMSFPQSAPHGVVFLHVTYVPAQEKNFTTAPAICHDGKAHFP
REGVFVSNGTHWFVTQRNFYEPQIITTDNTFVSGNCDVVIGIVNNTVYDPLQPELDSF
KEELDKYFKNHTSPDVDLGDISGINASVVNIQKEIDRLNEVAKNLNESLIDLQELGKY
EQGYIPEAPRDGQAYVRKDGEWVLLSTFLGLEVLFQGPWSHPQFEKHHHHHHHH**
(SEQ ID NO: 97)
WuS_IgE_DownDS2_2P_pVax
gccaccatggactggacctggatactctttctcgtagcagcagccacacgagtgcattcatcacagtgcgttaatctgaccacccgtac
acaactcccacccgcatacacaaatagctttacacgcggagtgtattaccccgataaagtctttcggagctcagtgctccattctactcaa
gatcttttcctgccgttctttagtaacgttacttggtttcatgcaatacatgtgtctggcacaaacggaaccaaacgttttgataatccggtgtt
gccatttaatgatggtgtatattttgcttccacggaaaagtcaaacatcatccgtgggtggatctttggcaccactcttgatagcaaatgtca
aagccttctgattgttaataacgctacaaacgtcgtaattaaagtgtgtgaattccagttctgtaatgaccccttcctcggagtatattacca
caagaataacaaatcttggatggagagcgaatttagagtttacagttcagccaataactgtacatttgaatatgtcagtcagcctttcctcat
ggacctcgaaggtaaacaaggtaattttaagaacttgagagagttcgtgtttaagaacatcgatggctatttcaaaatttactctaagcaca
caccaatcaacctggttcgagacctgccccagggtttctcagctttggaaccattggtggacctgccaatcggcattaacattaccagat
ttcaaactttgttggcactccaccggtcatatcttacccccggagacagttcctcaggctggacggcaggcgccgccgcgtactatgttg
ggtatctccaaccccgaaccttccttctcaaatacaatgaaaacgggacgattacagatgcagtcgattgcgccctggaccccttgtcc
gaaactaaatgcactctgaagagtttcacggtagagaagggaatctatcaaacgagcaattttcgagtccaaccaacggaatctattgtg
cggtttcccaatatcacaaacctctgtccattcggagaagtctttaatgctaccaggtttgcgtctgtatatgcatggaaccgaaagagga
tttccaattgcgtagcggactacagtgtcctttataacagcgcttcattttccacgtttaagtgttatggtgtttctccaacgaaactcaacga
cctctgttttactaacgtttacgctgacagctttgttatacgtggggacgaagtcaggcaaattgctcctggacagactggaaagatcgct
gattataattataaacttcctgacgatttcaccggctgcgttattgcatggaactccaacaatctggattcaaaagtgggtggaaattataat
tatctgtataggttgtttcggaagagcaatcttaagccctttgagcgggacatatgtaccgaaatttaccaagcaggctccaccccatgca
atggagtagaagggttcaattgctattttcctctgcaaagttatggctttcaacccaccaacggagttgggtatcaaccttacagggttgtc
gtgctgagtttcgaattgctccacgcacccgctacagtatgtggccccaagaagtccactaatcttgttaagaataaatgcgtgaacttca
acttcaatggacttacaggtactggagtactcacggaatcaaacaagaaatttctcccatttcaacagtttggccgagatatagctgacac
cacagatgctgttcgcgacccccagacgttggaaatacttgatatcactccctgcagcttcggcggcgtgagcgtgatcactccaggta
ctaatacgagcaatcaagttgccgttctgtaccaagatgtgaactgcaccgaggttccagtggcaattcacgccgaccaacttactccc
acctggcgggtctattccaccggatcaaacgtcttccaaactcgcgctggttgccttatcggtgcagagcacgttaataattcctatgaat
gtgacattcccataggagcaggcatctgtgcatcttatcaaacccagactaattcccctggttccgcttcctctgttgcatcccagtccata
attgcctacactatgagtctcggggctgaaaattccgtggcctattctaataattcaatcgccatcccaaccaattttaccatatccgtaacg
actgaaatacttcctgtcagtatgaccaagacctcagtggactgcaccatgtacatctgcggcgattctactgaatgttccaatctgctttt
gcaatatggttcattctgcacccaactcaacagggctcttacagggatcgccgtcgaacaggataagaatacccaggaagtgttcgcc
caagttaagcaaatttacaagacaccacccatcaaggacttcggcgggttcaacttcagccaaattctgcccgacccgtctaagccttct
aagcgctctttcattgaggatcttttgttcaataaggttacgcttgccgatgcagggtttatcaaacagtatggcgactgtcttggggatatc
gcagctagggatcttatttgtgcacagaaatttaatggcctgactgttcttccccctttgctcactgacgagatgattgcccagtacacttca
gctctcctggccgggactataacttctggttggaccttcggagctggcgccgccctgcaaattccatttgcaatgcagatggcttatcgct
tcaacggaattggggtgacccaaaatgttctctacgagaaccagaaactcattgcaaaccagttcaattctgcgatcgggaagatccag
gattccctgtctagtacggctagtgccctcggtaagctccaagacgtcgtcaaccaaaacgcccaggccttgaacacccttgtcaaaca
actgagctccaattttggggctattagcagtgtgctgaatgatatcctgtcccgccttgacccaccggaagcggaagtccaaattgatcg
actgatcactgggcgtctccaatcccttcaaacttacgtgacccaacaactcatccgagcagctgagattagggctagcgctaaccttg
ctgctactaagatgtcagagtgtgtcctcggccagtctaagagagtggacttttgtgggaaagggtaccacttgatgtcattcccacaaa
gcgccccacacggcgtggtgtttctccacgtcacttacgttccagctcaggaaaagaactttaccaccgcccccgctatatgtcatgatg
ggaaggcccactttcctcgtgaaggtgtctttgtcagcaatggcacacactggtttgtgacccaacggaatttctatgagcctcagattatt
accacggataacactttcgtatcagggaattgtgatgtggttatcggcatcgttaataatacagtgtatgacccactgcagccagagcttg
acagcttcaaagaagagctcgataagtactttaagaatcatacaagtcctgacgttgatcttggggatattagtgggattaacgccagcg
tcgtcaatattcagaaagagattgacaggttgaacgaagtagctaagaatcttaatgaaagcctgatagatttgcaagaacttggtaagta
tgagcaggggtacatacccgaggctcctcgggatgggcaggcctatgtacgcaaagacggtgaatgggtattgctcagcacttttctc
ggctgataa (SEQ ID NO: 98)
gccaccauggacuggaccuggauacucuuucucguagcagcagccacacgagugcauucaucacagugcguuaaucugac
cacccguacacaacucccacccgcauacacaaauagcuuuacacgcggaguguauuaccccgauaaagucuuucggagcu
cagugcuccauucuacucaagaucuuuuccugccguucuuuaguaacguuacuugguuucaugcaauacaugugucugg
cacaaacggaaccaaacguuuugauaauccgguguugccauuuaaugaugguguauauuuugcuuccacggaaaaguca
aacaucauccguggguggaucuuuggcaccacucuugauagcaaaugucaaagccuucugauuguuaauaacgcuacaa
acgucguaauuaaagugugugaauuccaguucuguaaugaccccuuccucggaguauauuaccacaagaauaacaaaucu
uggauggagagcgaauuuagaguuuacaguucagccaauaacuguacauuugaauaugucagucagccuuuccucaugg
accucgaagguaaacaagguaauuuuaagaacuugagagaguucguguuuaagaacaucgauggcuauuucaaaauuua
cucuaagcacacaccaaucaaccugguucgagaccugccccaggguuucucagcuuuggaaccauugguggaccugccaa
ucggcauuaacauuaccagauuucaaacuuuguuggcacuccaccggucauaucuuacccccggagacaguuccucaggc
uggacggcaggcgccgccgcguacuauguuggguaucuccaaccccgaaccuuccuucucaaauacaaugaaaacgggac
gauuacagaugcagucgauugcgcccuggaccccuuguccgaaacuaaaugcacucugaagaguuucacgguagagaag
ggaaucuaucaaacgagcaauuuucgaguccaaccaacggaaucuauugugcgguuucccaauaucacaaaccucugucc
auucggagaagucuuuaaugcuaccagguuugcgucuguauaugcauggaaccgaaagaggauuuccaauugcguagcg
gacuacaguguccuuuauaacagcgcuucauuuuccacguuuaaguguuaugguguuucuccaacgaaacucaacgacc
ucuguuuuacuaacguuuacgcugacagcuuuguuauacguggggacgaagucaggcaaauugcuccuggacagacugg
aaagaucgcugauuauaauuauaaacuuccugacgauuucaccggcugcguuauugcauggaacuccaacaaucuggau
ucaaaaguggguggaaauuauaauuaucuguauagguuguuucggaagagcaaucuuaagcccuuugagcgggacauau
guaccgaaauuuaccaagcaggcuccaccccaugcaauggaguagaaggguucaauugcuauuuuccucugcaaaguua
uggcuuucaacccaccaacggaguuggguaucaaccuuacaggguugucgugcugaguuucgaauugcuccacgcaccc
gcuacaguauguggccccaagaaguccacuaaucuuguuaagaauaaaugcgugaacuucaacuucaauggacuuacagg
uacuggaguacucacggaaucaaacaagaaauuucucccauuucaacaguuuggccgagauauagcugacaccacagaug
cuguucgcgacccccagacguuggaaauacuugauaucacucccugcagcuucggcggcgugagcgugaucacuccagg
uacuaauacgagcaaucaaguugccguucuguaccaagaugugaacugcaccgagguuccaguggcaauucacgccgacc
aacuuacucccaccuggcgggucuauuccaccggaucaaacgucuuccaaacucgcgcugguugccuuaucggugcaga
gcacguuaauaauuccuaugaaugugacauucccauaggagcaggcaucugugcaucuuaucaaacccagacuaauuccc
cugguuccgcuuccucuguugcaucccaguccauaauugccuacacuaugagucucggggcugaaaauuccguggccua
uucuaauaauucaaucgccaucccaaccaauuuuaccauauccguaacgacugaaauacuuccugucaguaugaccaaga
ccucaguggacugcaccauguacaucugcggcgauucuacugaauguuccaaucugcuuuugcaauaugguucauucug
cacccaacucaacagggcucuuacagggaucgccgucgaacaggauaagaauacccaggaaguguucgcccaaguuaagc
aaauuuacaagacaccacccaucaaggacuucggcggguucaacuucagccaaauucugcccgacccgucuaagccuucu
aagcgcucuuucauugaggaucuuuuguucaauaagguuacgcuugccgaugcaggguuuaucaaacaguauggcgacu
gucuuggggauaucgcagcuagggaucuuauuugugcacagaaauuuaauggccugacuguucuucccccuuugcucac
ugacgagaugauugcccaguacacuucagcucuccuggccgggacuauaacuucugguuggaccuucggagcuggcgcc
gcccugcaaauuccauuugcaaugcagauggcuuaucgcuucaacggaauuggggugacccaaaauguucucuacgaga
accagaaacucauugcaaaccaguucaauucugcgaucgggaagauccaggauucccugucuaguacggcuagugcccuc
gguaagcuccaagacgucgucaaccaaaacgcccaggccuugaacacccuugucaaacaacugagcuccaauuuuggggc
uauuagcagugugcugaaugauauccugucccgccuugacccaccggaagcggaaguccaaauugaucgacugaucacu
gggcgucuccaaucccuucaaacuuacgugacccaacaacucauccgagcagcugagauuagggcuagcgcuaaccuugc
ugcuacuaagaugucagaguguguccucggccagucuaagagaguggacuuuugugggaaaggguaccacuugauguc
auucccacaaagcgccccacacggcgugguguuucuccacgucacuuacguuccagcucaggaaaagaacuuuaccaccg
cccccgcuauaugucaugaugggaaggcccacuuuccucgugaaggugucuuugucagcaauggcacacacugguuugu
gacccaacggaauuucuaugagccucagauuauuaccacggauaacacuuucguaucagggaauugugaugugguuauc
ggcaucguuaauaauacaguguaugacccacugcagccagagcuugacagcuucaaagaagagcucgauaaguacuuuaa
gaaucauacaaguccugacguugaucuuggggauauuagugggauuaacgccagcgucgucaauauucagaaagagauu
gacagguugaacgaaguagcuaagaaucuuaaugaaagccugauagauuugcaagaacuugguaaguaugagcaggggu
acauacccgaggcuccucgggaugggcaggccuauguacgcaaagacggugaauggguauugcucagcacuuuucucgg
cugauaa (SEQ ID NO: 99)
MDWTWILFLVAAATRVHSSQCVNLTTRTQLPPAYTNSFTRGVYYPDKVFRSSVLHS
TQDLFLPFFSNVTWFHAIHVSGTNGTKRFDNPVLPFNDGVYFASTEKSNIIRGWIFGT
TLDSK [symbol] QSLLIVNNATNVVIKVCEFQFCNDPFLGVYYHKNNKSWMESEFRVYSSAN
NCTFEYVSQPFLMDLEGKQGNFKNLREFVFKNIDGYFKIYSKHTPINLVRDLPQGFSA
LEPLVDLPIGINITRFQTLLALHRSYLTPGDSSSGWTAGAAAYYVGYLQPRTFLLKYN
ENGTITDAVDCALDPLSETKCTLKSFTVEKGIYQTSNFRVQPTESIVRFPNITNLCPFGE
VFNATRFASVYAWNRKRISNCVADYSVLYNSASFSTFKCYGVSPTKLNDLCFTNVY
ADSFVIRGDEVRQIAPGQTGKIADYNYKLPDDFTGCVIAWNSNNLDSKVGGNYNYL
YRLFRKSNLKPFERDI [symbol] TEIYQAGSTPCNGVEGFNCYFPLQSYGFQPTNGVGYQPYRV
VVLSFELLHAPATVCGPKKSTNLVKNKCVNFNFNGLTGTGVLTESNKKFLPFQQFGR
DIADTTDAVRDPQTLEILDITPCSFGGVSVITPGTNTSNQVAVLYQDVNCTEVPVAIH
ADQLTPTWRVYSTGSNVFQTRAGCLIGAEHVNNSYECDIPIGAGICASYQTQTNSPGS
ASSVASQSIIAYTMSLGAENSVAYSNNSIAIPTNFTISVTTEILPVSMTKTSVDCTMYIC
GDSTECSNLLLQYGSFCTQLNRALTGIAVEQDKNTQEVFAQVKQIYKTPPIKDFGGFN
FSQILPDPSKPSKRSFIEDLLFNKVTLADAGFIKQYGDCLGDIAARDLICAQKFNGLTV
LPPLLTDEMIAQYTSALLAGTITSGWTFGAGAALQIPFAMQMAYRFNGIGVTQNVLY
ENQKLIANQFNSAIGKIQDSLSSTASALGKLQDVVNQNAQALNTLVKQLSSNFGAISS
VLNDILSRLD [symbol] EAEVQIDRLITGRLQSLQTYVTQQLIRAAEIRASANLAATKMSECVL
GQSKRVDFCGKGYHLMSFPQSAPHGVVFLHVTYVPAQEKNFTTAPAICHDGKAHFP
REGVFVSNGTHWFVTQRNFYEPQIITTDNTFVSGNCDVVIGIVNNTVYDPLQPELDSF
KEELDKYFKNHTSPDVDLGDISGINASVVNIQKEIDRLNEVAKNLNESLIDLQELGKY
EQGYIPEAPRDGQAYVRKDGEWVLLSTFLG** (SEQ ID NO: 100)
WuS_IgE_DownDS1 _2P_pVax
gccaccatggactggacctggatactctttctcgtagcagcagccacacgagtgcattcatcccagtgcgtgaacctgaccacccgaa
ctcaactcccaccagcatacaccaactcatttacaagaggagtttattacccggacaaggtatttcgaagttcagttcttcacagcaccca
agacctgtttctgccattcttcagtaatgtcacttggtttcacgcgatacatgtcagcggtacaaacgggacaaagcgattcgataaccca
gtactcccattcaacgacggagtgtattttgcatctacagagaaatccaacattatacgcgggtggatctttggaactactctggactcca
agacacagagcctgctcattgtgaacaatgcaacgaatgtcgtcataaaagtctgtgaatttcaattttgcaacgatcctttcctcggagtc
tattaccataagaacaataagagttggatggagagtgagtttcgcgtctattcttccgcgaacaattgtacatttgaatatgtatcacaacc
ctttcttatggatttggaaggcaaacaaggtaacttcaagaacttgcgcgagttcgtgttcaagaacatagactgttattttaagatctatag
taagcatacgccaatcaatctggtgcgagatttgcctcagggcttttctgctcttgaacccttggttgatctgcccatcgggatcaacataa
ccagatttcaaacgttgctcgcactccaccgcagctatctcactcctggcgattcctcatctgggtggaccgccggagctgctgcttatta
cgtcggctatctccagccgcgtactttcctgctcaagtataatgagaatggcaccattaccgatgctgtggattgtgctcttgatccactct
ctgaaaccaaatgcactctcaagtcttttaccgtggaaaagggtatttatcagacatctaattttcgggtgcaacctactgagtcaattgtac
ggtttcctaacataactaacctttgtccatttggggaagtcttcaatgccacgcggttcgcatcagtctatgcatggaacagaaaacgtatc
tccaactgcgtcgccgattattccgtcctttacaatagcgctagcttttccacattcaaatgttatggcgtatcaccaaccaaacttaacgat
ctctgctttactaatgtctacgctgactctttcgttattcgaggtgacgaggtgcgccaaattgcgcctggtcaaaccggaaagattgccg
attataactacaagctccccgacgactttacgggttgtgtgatcgcctggaatagcaataacctcgattctaaagttggcggtaattataac
tatctgtacagactctttaggaaaagtaatctcaagcccttttgcagggatatctcaaccgaaatctaccaagccggcagcactccttgca
atggtgtcgaggggtttaattgttatttcccactgcaatcttacggctttcaaccgactaatggagtcggttatcaaccctatagggtggtg
gtactctcctttgaacttttgcacgctccggcaacagtttgtggaccaaagaaaagtacgaaccttgttaagaataagtgtgttaatttcaat
tttaacggcctcactggaacaggtgtcctcacagaaagcaacaagaagtttctccctttccaacagtttggacgggatatcgccgacact
actgacgccgtcagagatcctcaaactctcgaaatcttggatatcacaccatgttctttcggtggtgtctccgtcataacaccaggaacta
acacctctaatcaagtggccgtgctctatcaggacgtcaattgcacagaagtgcctgtcgcaatccatgctgatcagctcactcccacct
ggcgtgtgtattccactggctctaatgtctttcagacacgggcaggttgccttattggggcagagcatgtgaacaattcctacgaatgcg
atatacccattggggcaggcatttgcgccagctaccaaacccaaactaacagccccgggagtgccagcagcgtggcatctcagtcca
ttattgcctatacgatgagcctgggtgctgaaaatagcgtggcttatagtaataactctatcgccatacccacaaacttcaccatttcagtg
accaccgaaatccttcctgtttctatgaccaaaacgtccgtcgattgtacaatgtacatttgcggcgatagcactgaatgttcaaacctgct
cctgcaatacggctctttctgtactcagctcaaccgggcactcaccggcatagccgtcgaacaagacaagaatacccaggaagtctttg
cgcaggtgaaacaaatctataagaccccaccaataaaagatttcggcggttttaatttcagccaaatcttgcctgatcccagcaagccat
ctaaacggtctttcattgaagatctcctgttcaacaaggttacgctggctgacgccgggtttattaagcaatatggcgattgccttgggga
cattgccgcacgagacctcatttgtgcccagaaattcaacgggctcaccgtattgcccccgctcctcacagacgaaatgatcgcccaat
atacaagcgccctgcttgcgggaaccattacaagcggttggacctttggtgccggcgcagctctgcaaatacccttcgcaatgcaaat
ggcatatcggtttaatggaattggcgtaacccaaaacgtgctgtatgaaaaccagaaactgatcgcaaatcaattcaatagtgctatagg
aaagatccaagacagtctgtcttccactgctagcgcgctggggaagctccaagacgttgtgaaccaaaacgcgcaggccctgaatac
cctggtgaagcaactttcaagcaatttcggtgctatatcttctgtcctcaatgacattctctctcggctcgatcccccggaagccgaagttc
agatagaccgtttgatcacaggccgcttgcaatccctgcaaacctacgttacacaacaactgattcgcgccgccgaaattcgggcatcc
gccaatctggccgcaaccaaaatgtccgagtgtgttctcggtcaatccaaacgcgtggatttctgcggaaaaggataccatttgatgtca
tttccacaatcagctccacacggtgttgtattcctgcacgtgacctacgtgccagcccaggagaagaattttactactgcgcccgccattt
gtcatgacgggaaggctcattttcctcgggaaggggttttcgtctcaaacggtacccattggttcgtgactcagaggaacttttatgaacc
tcaaatcataacgaccgataacacgtttgtaagtggcaattgcgacgtggtcatcgggattgtaaacaatactgtctatgaccctctccaa
ccagagcttgacagctttaaagaagagcttgataaatactttaagaaccatacctcaccagacgtcgatttgggagatatcagtggcatt
aatgcctctgtcgtcaatatccagaaagagattgaccgcttgaacgaagttgccaagaatcttaatgagtctctgattgacttgcaagaatt
gggaaaatatgaacaaggatatattccagaagcccctcgcgatgggcaagcatatgttcgaaaggatggggaatgggtgctgctcag
cacctttctcggttgataa (SEQ ID NO: 101)
gccaccauggacuggaccuggauacucuuucucguagcagcagccacacgagugcauucaucccagugcgugaaccugac
cacccgaacucaacucccaccagcauacaccaacucauuuacaagaggaguuuauuacccggacaagguauuucgaaguu
caguucuucacagcacccaagaccuguuucugccauucuucaguaaugucacuugguuucacgcgauacaugucagcgg
uacaaacgggacaaagcgauucgauaacccaguacucccauucaacgacggaguguauuuugcaucuacagagaaaucca
acauuauacgcggguggaucuuuggaacuacucuggacuccaagacacagagccugcucauugugaacaaugcaacgaau
gucgucauaaaagucugugaauuucaauuuugcaacgauccuuuccucggagucuauuaccauaagaacaauaagaguu
ggauggagagugaguuucgcgucuauucuuccgcgaacaauuguacauuugaauauguaucacaacccuuucuuaugga
uuuggaaggcaaacaagguaacuucaagaacuugcgcgaguucguguucaagaacauagacuguuauuuuaagaucuau
aguaagcauacgccaaucaaucuggugcgagauuugccucagggcuuuucugcucuugaacccuugguugaucugccca
ucgggaucaacauaaccagauuucaaacguugcucgcacuccaccgcagcuaucucacuccuggcgauuccucaucuggg
uggaccgccggagcugcugcuuauuacgucggcuaucuccagccgcguacuuuccugcucaaguauaaugagaauggca
ccauuaccgaugcuguggauugugcucuugauccacucucugaaaccaaaugcacucucaagucuuuuaccguggaaaa
ggguauuuaucagacaucuaauuuucgggugcaaccuacugagucaauuguacgguuuccuaacauaacuaaccuuugu
ccauuuggggaagucuucaaugccacgcgguucgcaucagucuaugcauggaacagaaaacguaucuccaacugcgucg
ccgauuauuccguccuuuacaauagcgcuagcuuuuccacauucaaauguuauggcguaucaccaaccaaacuuaacgau
cucugcuuuacuaaugucuacgcugacucuuucguuauucgaggugacgaggugcgccaaauugcgccuggucaaaccg
gaaagauugccgauuauaacuacaagcuccccgacgacuuuacggguugugugaucgccuggaauagcaauaaccucga
uucuaaaguuggcgguaauuauaacuaucuguacagacucuuuaggaaaaguaaucucaagcccuuuugcagggauauc
ucaaccgaaaucuaccaagccggcagcacuccuugcaauggugucgagggguuuaauuguuauuucccacugcaaucuu
acggcuuucaaccgacuaauggagucgguuaucaacccuauaggguggugguacucuccuuugaacuuuugcacgcucc
ggcaacaguuuguggaccaaagaaaaguacgaaccuuguuaagaauaaguguguuaauuucaauuuuaacggccucacu
ggaacagguguccucacagaaagcaacaagaaguuucucccuuuccaacaguuuggacgggauaucgccgacacuacuga
cgccgucagagauccucaaacucucgaaaucuuggauaucacaccauguucuuucgguggugucuccgucauaacaccag
gaacuaacaccucuaaucaaguggccgugcucuaucaggacgucaauugcacagaagugccugucgcaauccaugcugau
cagcucacucccaccuggcguguguauuccacuggcucuaaugucuuucagacacgggcagguugccuuauuggggcag
agcaugugaacaauuccuacgaaugcgauauacccauuggggcaggcauuugcgccagcuaccaaacccaaacuaacagc
cccgggagugccagcagcguggcaucucaguccauuauugccuauacgaugagccugggugcugaaaauagcguggcuu
auaguaauaacucuaucgccauacccacaaacuucaccauuucagugaccaccgaaauccuuccuguuucuaugaccaaaa
cguccgucgauuguacaauguacauuugcggcgauagcacugaauguucaaaccugcuccugcaauacggcucuuucug
uacucagcucaaccgggcacucaccggcauagccgucgaacaagacaagaauacccaggaagucuuugcgcaggugaaac
aaaucuauaagaccccaccaauaaaagauuucggcgguuuuaauuucagccaaaucuugccugaucccagcaagccaucu
aaacggucuuucauugaagaucuccuguucaacaagguuacgcuggcugacgccggguuuauuaagcaauauggcgauu
gccuuggggacauugccgcacgagaccucauuugugcccagaaauucaacgggcucaccguauugcccccgcuccucaca
gacgaaaugaucgcccaauauacaagcgcccugcuugcgggaaccauuacaagcgguuggaccuuuggugccggcgcag
cucugcaaauacccuucgcaaugcaaauggcauaucgguuuaauggaauuggcguaacccaaaacgugcuguaugaaaac
cagaaacugaucgcaaaucaauucaauagugcuauaggaaagauccaagacagucugucuuccacugcuagcgcgcuggg
gaagcuccaagacguugugaaccaaaacgcgcaggcccugaauacccuggugaagcaacuuucaagcaauuucggugcua
uaucuucuguccucaaugacauucucucucggcucgaucccccggaagccgaaguucagauagaccguuugaucacagg
ccgcuugcaaucccugcaaaccuacguuacacaacaacugauucgcgccgccgaaauucgggcauccgccaaucuggccg
caaccaaaauguccgaguguguucucggucaauccaaacgcguggauuucugcggaaaaggauaccauuugaugucauu
uccacaaucagcuccacacgguguuguauuccugcacgugaccuacgugccagcccaggagaagaauuuuacuacugcgc
ccgccauuugucaugacgggaaggcucauuuuccucgggaagggguuuucgucucaaacgguacccauugguucgugac
ucagaggaacuuuuaugaaccucaaaucauaacgaccgauaacacguuuguaaguggcaauugcgacguggucaucggg
auuguaaacaauacugucuaugacccucuccaaccagagcuugacagcuuuaaagaagagcuugauaaauacuuuaagaa
ccauaccucaccagacgucgauuugggagauaucaguggcauuaaugccucugucgucaauauccagaaagagauugacc
gcuugaacgaaguugccaagaaucuuaaugagucucugauugacuugcaagaauugggaaaauaugaacaaggauauau
uccagaagccccucgcgaugggcaagcauauguucgaaaggauggggaaugggugcugcucagcaccuuucucgguuga
uaa (SEQ ID NO: 102)
MDWTWILFLVAAATRVHSSQCVNLTTRTQLPPAYTNSFTRGVYYPDKVFRSSVLHS
TQDLFLPFFSNVTWFHAIHVSGTNGTKRFDNPVLPFNDGVYFASTEKSNIIRGWIFGT
TLDSKTQSLLIVNNATNVVIKVCEFQFCNDPFLGVYYHKNNKSWMESEFRVYSSAN
NCTFEYVSQPFLMDLEGKQGNFKNLREFVFKNID [symbol] YFKIYSKHTPINLVRDLPQGFSA
LEPLVDLPIGINITRFQTLLALHRSYLTPGDSSSGWTAGAAAYYVGYLQPRTFLLKYN
ENGTITDAVDCALDPLSETKCTLKSFTVEKGIYQTSNFRVQPTESIVRFPNITNLCPFGE
VFNATRFASVYAWNRKRISNCVADYSVLYNSASFSTFKCYGVSPTKLNDLCFTNVY
ADSFVIRGDEVRQIAPGQTGKIADYNYKLPDDFTGCVIAWNSNNLDSKVGGNYNYL
YRLFRKSNLKPFCRDISTEIYQAGSTPCNGVEGFNCYFPLQSYGFQPTNGVGYQPYRV
VVLSFELLHAPATVCGPKKSTNLVKNKCVNFNFNGLTGTGVLTESNKKFLPFQQFGR
DIADTTDAVRDPQTLEILDITPCSFGGVSVITPGTNTSNQVAVLYQDVNCTEVPVAIH
ADQLTPTWRVYSTGSNVFQTRAGCLIGAEHVNNSYECDIPIGAGICASYQTQTNSPGS
ASSVASQSIIAYTMSLGAENSVAYSNNSIAIPTNFTISVTTEILPVSMTKTSVDCTMYIC
GDSTECSNLLLQYGSFCTQLNRALTGIAVEQDKNTQEVFAQVKQIYKTPPIKDFGGFN
FSQILPDPSKPSKRSFIEDLLFNKVTLADAGFIKQYGDCLGDIAARDLICAQKFNGLTV
LPPLLTDEMIAQYTSALLAGTITSGWTFGAGAALQIPFAMQMAYRFNGIGVTQNVLY
ENQKLIANQFNSAIGKIQDSLSSTASALGKLQDVVNQNAQALNTLVKQLSSNFGAISS
VLNDILSRLDPPEAEVQIDRLITGRLQSLQTYVTQQLIRAAEIRASANLAATKMSECVL
GQSKRVDFCGKGYHLMSFPQSAPHGVVFLHVTYVPAQEKNFTTAPAICHDGKAHFP
REGVFVSNGTHWFVTQRNFYEPQIITTDNTFVSGNCDVVIGIVNNTVYDPLQPELDSF
KEELDKYFKNHTSPDVDLGDISGINASVVNIQKEIDRLNEVAKNLNESLIDLQELGKY
EQGYIPEAPRDGQAYVRKDGEWVLLSTFLG** (SEQ ID NO: 103)
WuS_IgE_2P_UpGly_pVax
gccaccatggattggacctggatacttttcctcgtggccgcagcaacaagagtccactcctctcagtgcgttaacctgactactagaacc
caattgcccccggcatacacaaactctttcacccggggtgtctactatcccgacaaagtgtttagaagtagcgtgctgcacagcaccca
agatctctttctgccattcttctcaaacgtcacctggtttcacgccatccatgtaagcgggaccaacggcacaaagcgttttgataaccct
gttttgccattcaatgatggcgtgtattttgcttccactgagaaaagcaacatcattagagggtggatatttggcacaacgcttgactccaa
gacgcagagtcttttgatagtaaacaacgcaactaatgtggtcattaaagtctgtgaatttcaattttgcaatgaccccttccttggagtctat
taccacaagaacaacaaaagctggatggaaagcgaatttagggtctacagctctgccaataactgcacattcgaatacgtcagccaac
cattcttgatggacctggaaggcaagcaaggaaactttaagaatctgagggaatttgtgtttaagaatatcgacggatattttaagatctat
tccaagcatactcccattaatctcgttcgtgaccttcctcagggtttctctgcattggaacccctcgtagatttgcccattgggattaatatca
ctagattccagacgctgcttgcactccatcgatcttatctgacccctggtgactcctcttccgggtggacggcgggtgctgcagcctact
acgttggctatttgcaacctaggacctttctgttgaagtataatgagaatgggactattactgatgccgttgattgcgccctcgatccgctgt
cagaaacaaagtgcaccctgaagagcttcacagtagaaaagggaatctatcaaacctcaaatttccgcgttcaaccaactgaatcaatc
gtgcgttttcctaacatcacaaatctgtgtccgtttggagaagtatttaatgcgacgcgtttcgcaagcgtctacgcgtggaatcgcaaac
gtatctctaattgcgtagcagattattctgtgctgtacaatagcgcatctttctcaacgtttaagtgctacggcgttaatgggaccaagctga
atgatctctgtttcactaatgtgtacgcagacagttttgtaattagaggagacgaggttaggcaaatagcaccgggtcaaactggcaaaa
tcgccgactataactacaagctccctgatgacttcacgggctgcgtaattgcttggaactctaataacctggactctaaagtcggcggga
attataattatctctatcggttgtttcgaaaatccaatctcaaaccctttgagcgggacatcaatactacaatttatcaagctggtagtactcct
tgcaatggggtagaaggcttcaattgttatttcccccttcaatcttacggatttcaacccacgaacggcgtagggtaccagccctatcgag
tggtggtactgtcattcgaacttaatcacgccccagcaacagtctgcgggcctaagaaaagcacgaatcttgtcaagaataagtgtgta
aatttcaacttcaatggtcttacaggcacgggagtgctcactgagtctaataagaaatttcttcctttccaacaattcggtcgtgatattgcc
gatactactgatgcagtccgagatccacaaactctcgaaatcctcgatattactccttgtagttttggcggcgtctccgtgatcaccccag
ggaccaacactagtaaccaagtggcggtgctctaccaagatgttaactgcacagaagtcccggtagcgatccatgccgaccagctca
ctcccacatggcgtgtttacagcacagggtcaaacgttttccagacccgtgccggatgtcttataggagccgaacacgtaaataacagt
tatgaatgcgatatcccaattggtgcaggtatctgtgcgtcatatcaaacccaaactaattctccggggtccgcctcaagcgttgcctcac
aatcaataatcgcctacacaatgtccctcggtgccgaaaattcagtcgcttactctaacaatagcattgctatccctaccaacttcactattt
ctgttaccacggaaattttgcctgtatccatgaccaaaacatctgttgattgcacgatgtacatctgcggggattctaccgaatgttctaac
ctgcttctgcaatacggctccttctgcacccaattgaaccgcgcactgactgggattgctgtggaacaagacaagaatactcaagaagt
atttgcccaggtcaaacagatttacaaaactcccccaattaaagatttcggcggtttcaattttagtcaaattctgccagatccaagtaagc
catccaaacgctcatttattgaggacctgctctttaataaagtcacgctggccgacgccggcttcataaaacagtatggcgattgtcttgg
agacatcgccgcccgcgacctcatttgcgcacaaaagttcaatgggctcaccgtgttgccaccactgctcacagatgagatgatcgca
cagtacacgagcgcccttcttgccggcactatcacgtctggttggacgttcggtgccggagccgctctgcaaattccctttgcaatgcaa
atggcctatagatttaatggaattggcgtaacacagaacgtgttgtacgagaaccagaagctcattgccaaccagttcaattccgctattg
gcaaaatacaagactctctcagctcaactgctagcgcactgggaaaattgcaagacgtagtcaatcaaaatgcccaagccctcaatact
ctcgtcaaacagttgtcttccaactttggggctatcagtagtgtactcaatgacattctttcaagactggacccgcccgaggcggaagtcc
aaattgatcgtctgataactggaaggttgcaaagccttcagacctacgttacgcaacaacttattagggctgccgaaataagggcatcc
gctaatctggcagctacaaagatgtctgaatgtgttttgggacagagcaaacgggttgacttctgcggtaaaggttaccatctcatgtcttt
tccacaaagcgcaccgcacggagtcgtcttcctgcatgtaacatacgtcccagcccaagaaaagaattttaccacagccccagccatc
tgccacgacggcaaggcgcatttcccaagggaaggcgtgtttgtatccaacgggacgcattggtttgtcactcaaaggaacttttacga
accccaaattattaccactgataacaccttcgtttctgggaactgtgatgtcgtgattgggatagtaaacaacacggtatatgatccactgc
aaccagaactggattccttcaaagaagagctggacaaatacttcaagaatcatactagtcctgacgtcgacctgggcgatatcagtgga
atcaacgctagcgtcgtaaacattcaaaaggagatcgatagacttaacgaggtcgccaagaatctcaatgaaagcctcatcgatttgca
agaactcggaaaatatgagcaaagcggatcagggtacattccggaagcccccagggacggacaggcatatgtccgcaaggacgga
gaatgggttcttcttagcacttttctggggtaatga (SEQ ID NO: 104)
gccaccauggauuggaccuggauacuuuuccucguggccgcagcaacaagaguccacuccucucagugcguuaaccugac
uacuagaacccaauugcccccggcauacacaaacucuuucacccggggugucuacuaucccgacaaaguguuuagaagua
gcgugcugcacagcacccaagaucucuuucugccauucuucucaaacgucaccugguuucacgccauccauguaagcggg
accaacggcacaaagcguuuugauaacccuguuuugccauucaaugauggcguguauuuugcuuccacugagaaaagca
acaucauuagaggguggauauuuggcacaacgcuugacuccaagacgcagagucuuuugauaguaaacaacgcaacuaau
guggucauuaaagucugugaauuucaauuuugcaaugaccccuuccuuggagucuauuaccacaagaacaacaaaagcu
ggauggaaagcgaauuuagggucuacagcucugccaauaacugcacauucgaauacgucagccaaccauucuugauggac
cuggaaggcaagcaaggaaacuuuaagaaucugagggaauuuguguuuaagaauaucgacggauauuuuaagaucuauu
ccaagcauacucccauuaaucucguucgugaccuuccucaggguuucucugcauuggaaccccucguagauuugcccau
ugggauuaauaucacuagauuccagacgcugcuugcacuccaucgaucuuaucugaccccuggugacuccucuuccggg
uggacggcgggugcugcagccuacuacguuggcuauuugcaaccuaggaccuuucuguugaaguauaaugagaauggg
acuauuacugaugccguugauugcgcccucgauccgcugucagaaacaaagugcacccugaagagcuucacaguagaaaa
gggaaucuaucaaaccucaaauuuccgcguucaaccaacugaaucaaucgugcguuuuccuaacaucacaaaucuguguc
cguuuggagaaguauuuaaugcgacgcguuucgcaagcgucuacgcguggaaucgcaaacguaucucuaauugcguagc
agauuauucugugcuguacaauagcgcaucuuucucaacguuuaagugcuacggcguuaaugggaccaagcugaaugau
cucuguuucacuaauguguacgcagacaguuuuguaauuagaggagacgagguuaggcaaauagcaccgggucaaacug
gcaaaaucgccgacuauaacuacaagcucccugaugacuucacgggcugcguaauugcuuggaacucuaauaaccuggac
ucuaaagucggcgggaauuauaauuaucucuaucgguuguuucgaaaauccaaucucaaacccuuugagcgggacauca
auacuacaauuuaucaagcugguaguacuccuugcaaugggguagaaggcuucaauuguuauuucccccuucaaucuua
cggauuucaacccacgaacggcguaggguaccagcccuaucgaguggugguacugucauucgaacuuaaucacgccccag
caacagucugcgggccuaagaaaagcacgaaucuugucaagaauaaguguguaaauuucaacuucaauggucuuacaggc
acgggagugcucacugagucuaauaagaaauuucuuccuuuccaacaauucggucgugauauugccgauacuacugaug
caguccgagauccacaaacucucgaaauccucgauauuacuccuuguaguuuuggcggcgucuccgugaucaccccagg
gaccaacacuaguaaccaaguggcggugcucuaccaagauguuaacugcacagaagucccgguagcgauccaugccgacc
agcucacucccacauggcguguuuacagcacagggucaaacguuuuccagacccgugccggaugucuuauaggagccga
acacguaaauaacaguuaugaaugcgauaucccaauuggugcagguaucugugcgucauaucaaacccaaacuaauucuc
cgggguccgccucaagcguugccucacaaucaauaaucgccuacacaaugucccucggugccgaaaauucagucgcuuac
ucuaacaauagcauugcuaucccuaccaacuucacuauuucuguuaccacggaaauuuugccuguauccaugaccaaaac
aucuguugauugcacgauguacaucugcggggauucuaccgaauguucuaaccugcuucugcaauacggcuccuucugc
acccaauugaaccgcgcacugacugggauugcuguggaacaagacaagaauacucaagaaguauuugcccaggucaaaca
gauuuacaaaacucccccaauuaaagauuucggcgguuucaauuuuagucaaauucugccagauccaaguaagccaucca
aacgcucauuuauugaggaccugcucuuuaauaaagucacgcuggccgacgccggcuucauaaaacaguauggcgauug
ucuuggagacaucgccgcccgcgaccucauuugcgcacaaaaguucaaugggcucaccguguugccaccacugcucacag
augagaugaucgcacaguacacgagcgcccuucuugccggcacuaucacgucugguuggacguucggugccggagccgc
ucugcaaauucccuuugcaaugcaaauggccuauagauuuaauggaauuggcguaacacagaacguguuguacgagaac
cagaagcucauugccaaccaguucaauuccgcuauuggcaaaauacaagacucucucagcucaacugcuagcgcacuggg
aaaauugcaagacguagucaaucaaaaugcccaagcccucaauacucucgucaaacaguugucuuccaacuuuggggcua
ucaguaguguacucaaugacauucuuucaagacuggacccgcccgaggcggaaguccaaauugaucgucugauaacugg
aagguugcaaagccuucagaccuacguuacgcaacaacuuauuagggcugccgaaauaagggcauccgcuaaucuggcag
cuacaaagaugucugaauguguuuugggacagagcaaacggguugacuucugcgguaaagguuaccaucucaugucuuu
uccacaaagcgcaccgcacggagucgucuuccugcauguaacauacgucccagcccaagaaaagaauuuuaccacagcccc
agccaucugccacgacggcaaggcgcauuucccaagggaaggcguguuuguauccaacgggacgcauugguuugucacu
caaaggaacuuuuacgaaccccaaauuauuaccacugauaacaccuucguuucugggaacugugaugucgugauuggga
uaguaaacaacacgguauaugauccacugcaaccagaacuggauuccuucaaagaagagcuggacaaauacuucaagaau
cauacuaguccugacgucgaccugggcgauaucaguggaaucaacgcuagcgucguaaacauucaaaaggagaucgauag
acuuaacgaggucgccaagaaucucaaugaaagccucaucgauuugcaagaacucggaaaauaugagcaaagcggaucag
gguacauuccggaagcccccagggacggacaggcauauguccgcaaggacggagaauggguucuucuuagcacuuuucu
gggguaauga (SEQ ID NO: 105)
MDWTWILFLVAAATRVHSSQCVNLTTRTQLPPAYTNSFTRGVYYPDKVFRSSVLHS
TQDLFLPFFSNVTWFHAIHVSGTNGTKRFDNPVLPFNDGVYFASTEKSNIIRGWIFGT
TLDSKTQSLLIVNNATNVVIKVCEFQFCNDPFLGVYYHKNNKSWMESEFRVYSSAN
NCTFEYVSQPFLMDLEGKQGNFKNLREFVFKNIDGYFKIYSKHTPINLVRDLPQGFSA
LEPLVDLPIGINITRFQTLLALHRSYLTPGDSSSGWTAGAAAYYVGYLQPRTFLLKYN
ENGTITDAVDCALDPLSETKCTLKSFTVEKGIYQTSNFRVQPTESIVRFPNITNLCPFGE
VFNATRFASVYAWNRKRISNCVADYSVLYNSASFSTFKCYGV [symbol] TKLNDLCFTNVY
ADSFVIRGDEVRQIAPGQTGKIADYNYKLPDDFTGCVIAWNSNNLDSKVGGNYNYL
YRLFRKSNLKPFERDI [symbol] T [symbol] IYQAGSTPCNGVEGFNCYFPLQSYGFQPTNGVGYQPYRV
VVLSFEL [symbol] HAPATVCGPKKSTNLVKNKCVNFNFNGLTGTGVLTESNKKFLPFQQFGR
DIADTTDAVRDPQTLEILDITPCSFGGVSVITPGTNTSNQVAVLYQDVNCTEVPVAIH
ADQLTPTWRVYSTGSNVFQTRAGCLIGAEHVNNSYECDIPIGAGICASYQTQTNSPGS
ASSVASQSIIAYTMSLGAENSVAYSNNSIAIPTNFTISVTTEILPVSMTKTSVDCTMYIC
GDSTECSNLLLQYGSFCTQLNRALTGIAVEQDKNTQEVFAQVKQIYKTPPIKDFGGFN
FSQILPDPSKPSKRSFIEDLLFNKVTLADAGFIKQYGDCLGDIAARDLICAQKFNGLTV
LPPLLTDEMIAQYTSALLAGTITSGWTFGAGAALQIPFAMQMAYRFNGIGVTQNVLY
ENQKLIANQFNSAIGKIQDSLSSTASALGKLQDVVNQNAQALNTLVKQLSSNFGAISS
VLNDILSRLDPPEAEVQIDRLITGRLQSLQTYVTQQLIRAAEIRASANLAATKMSECVL
GQSKRVDFCGKGYHLMSFPQSAPHGVVFLHVTYVPAQEKNFTTAPAICHDGKAHFP
REGVFVSNGTHWFVTQRNFYEPQIITTDNTFVSGNCDVVIGIVNNTVYDPLQPELDSF
KEELDKYFKNHTSPDVDLGDISGINASVVNIQKEIDRLNEVAKNLNESLIDLQELGKY
EQSGSGYIPEAPRDGQAYVRKDGEWVLLSTFLG** (SEQ ID NO: 106)
WuS_DownDS3_D2P_Furin_pVax
gccaccatggactggacctggatactctttctcgtagcagcagccacacgagtgcattcaatgttcgttttcctcgtgctcttgcctttggtt
tcttctcagtgcgtaaacctcacgactcgaacccaactgcccccagcttatacaaattcctttacgcggggcgtctattacccggataag
gttttcagatccagcgtgctgcatagtacacaagatctctttcttcctttcttctcaaatgtaacctggtttcacgctattcatgtatccggcac
caatggaactaaaagatttgataacccggtgttgcccttcaatgatggtgtgtatttcgcttccacggaaaagtcaaacatcatcagaggg
tggatattcggcacaacattggattccaagtgccagtcactcctcatagtgaacaatgctactaacgtggttataaaggtctgcgaatttca
attttgtaatgatcctttcctcggtgtttactatcacaagaacaataagtcctggatggaatcagaattccgtgtatacagttctgcgaacaat
tgcacattcgaatatgtgtcccaaccctttctcatggatctggaagggaagcagggtaactttaagaatctgagagaattcgtgttcaaga
acattgactgctattttaaaatctatagcaaacacacccctataaacttggtacgggatttgcctcaaggattctcagcactcgaacccttg
gtcgatttgccaatcggcatcaatatcacccggtttcagacactcctggctcttcaccgctcctacttgacacctggtgattcctcatctggt
tggaccgccggcgcagcggcatactatgtcggctatcttcaaccaagaaccttcttgctgaaatataatgagaacggaactataactgat
gccgttgattgtgcccttgatccacttagcgaaacaaagtgcactctgaagtccttcacagttgaaaaggggatctaccaaacatccaac
ttccgggtacaacctactgagtccatagtgcgatttcctaacattaccaatctgtgcccatttggagaagtattcaacgcaactaggttcgc
gtccgtttacgcgtggaacaggaaaaggatttccaattgcgtcgccgactatagcgttctctataacagcgcctcatttagcacgtttaag
tgttacggggttagtccgaccaaactcaatgacttgtgttttaccaatgtctatgcagactcctttgttattagaggcgacgaggtcagaca
aattgcccccggacagacaggtaagattgcagattataattataaactgccggacgacttcacggggtgtgttattgcatggaactccaa
taacctggactctaaagtaggcgggaactataactatctgtatcgcctgtttcgcaaatctaacctgaaacccttctgcagggacatatgt
actgaaatatatcaagctggcagcacaccttgtaatggcgtcgagggattcaattgttacttcccacttcaatcttacggttttcagcctact
aacggcgtagggtatcaaccctatagagttgtagtgctctctttcgaattgctccatgcccccgcgactgtttgtggacctaagaagtcca
cgaacctggtaaagaacaagtgtgttaattttaattttaatggactgaccgggactggagtgctgactgaaagtaacaagaaatttctgcc
tttccaacaatttggccgcgatatcgctgataccaccgacgccgtcagagatccgcagactctcgaaatcctggacatcacgccctgct
cattcggcggggttagcgttattactccaggcactaacactagcaatcaagttgcagttctgtaccaggatgtgaactgtaccgaagtcc
ccgtcgccattcatgccgatcagctgaccccgacttggcgggtatattcaaccggcagcaatgtctttcaaacaagggcgggttgtctc
atcggagcggagcatgtaaataatagttatgaatgcgacatccccattggcgcggggatctgtgcttcatatcaaactcaaaccaattcc
ccacggcggagacgatcagtagccagtcaatcaataattgcgtatacgatgagtcttggggcagaaaatagcgtggcttattctaataat
agcatcgctatacctacaaattttacaatcagtgtaactaccgaaatccttcctgtcagcatgaccaaaactagcgtagattgcacgatgt
atatttgcggagactcaactgagtgcagtaacctgttgttgcaatacggaagtttctgtacccagctgaaccgcgctcttacgggcattgc
agtagaacaagataagaatacccaagaagtgtttgcccaggtgaaacaaatctacaagactcccccgattaaagactttggcgggttca
acttcagccagatattgcccgacccgtctcgtcgtagacggtcctttattgaagacctgctcttcaacaaggtcacactggctgatgcag
gttttattaagcaatacggcgactgtcttggcgacatcgccgctagggaccttatatgtgctcagaaattcaatggtctgacagttctgcca
cccttgctcactgacgaaatgatcgctcaatatacaagcgccttgctggctgggactattacttccggatggacattcggggcgggtgc
cgccttgcaaattccttttgcaatgcaaatggcataccgtttcaacggaatcggcgtaacccagaatgtgctctatgaaaaccagaaattg
atagcaaatcaatttaactcagccataggaaagattcaagactctctcagctcaaccgcgagtgctctcggcaagctccaagacgtagt
aaatcaaaatgcacaagctttgaacactttggtaaagcaattgtcttccaacttcggggcgatctcatctggccctaacgacatcctgtcc
cggttgcccaaagtggaagccgaggtgcagatcgaccgcctcatcaccggccgacttcaatcactccaaacctacgtgactcaacaa
ctgatccgggcagccgagataagggcgagtgcaaacttggcagctacgaaaatgtcagaatgtgttctcggccagagtaaacgggta
gacttttgtgggaaaggttatcacttgatgtctttccctcaaagcgctcctcacggcgtcgtcttcttgcatgtgacttacgtgccagctcaa
gaaaagaacttcaccaccgcccctgctatatgccatgacggtaaagctcacttcccccgagagggcgtgttcgttagtaatggaaccc
attggtttgtgactcaacgaaacttttatgaacctcaaataattaccacggataacacttttgttagtggtaattgtgacgtggtgatcggcat
tgtgaataacacagtctacgatcctctgcaaccagaactggacagctttaaagaggaacttgacaaatatttcaagaaccatacaagcc
ccgacgtcgacctgggcgacatcagtggaatcaatgcgtccgtagtcaatatccagaaggagattgatcggcttaatgaagtcgctaa
gaatttgaatgaaagtcttatagatctgcaagaactcgggaagtacgagcaatatattaaatggccttggtccggacgtagaaggcgca
ggcggggctcaggcggttcagggtcagggtatattcccgaggcgccacgcgatgggcaagcgtacgtgcgtaaagatggcgaatg
ggtgttgctttccacattcttggggtgataa (SEQ ID NO: 107)
gccaccauggacuggaccuggauacucuuucucguagcagcagccacacgagugcauucaauguucguuuuccucgugc
ucuugccuuugguuucuucucagugcguaaaccucacgacucgaacccaacugcccccagcuuauacaaauuccuuuacg
cggggcgucuauuacccggauaagguuuucagauccagcgugcugcauaguacacaagaucucuuucuuccuuucuucu
caaauguaaccugguuucacgcuauucauguauccggcaccaauggaacuaaaagauuugauaacccgguguugcccuu
caaugaugguguguauuucgcuuccacggaaaagucaaacaucaucagaggguggauauucggcacaacauuggauucc
aagugccagucacuccucauagugaacaaugcuacuaacgugguuauaaaggucugcgaauuucaauuuuguaaugauc
cuuuccucgguguuuacuaucacaagaacaauaaguccuggauggaaucagaauuccguguauacaguucugcgaacaa
uugcacauucgaauaugugucccaacccuuucucauggaucuggaagggaagcaggguaacuuuaagaaucugagagaa
uucguguucaagaacauugacugcuauuuuaaaaucuauagcaaacacaccccuauaaacuugguacgggauuugccuca
aggauucucagcacucgaacccuuggucgauuugccaaucggcaucaauaucacccgguuucagacacuccuggcucuuc
accgcuccuacuugacaccuggugauuccucaucugguuggaccgccggcgcagcggcauacuaugucggcuaucuuca
accaagaaccuucuugcugaaauauaaugagaacggaacuauaacugaugccguugauugugcccuugauccacuuagc
gaaacaaagugcacucugaaguccuucacaguugaaaaggggaucuaccaaacauccaacuuccggguacaaccuacuga
guccauagugcgauuuccuaacauuaccaaucugugcccauuuggagaaguauucaacgcaacuagguucgcguccguu
uacgcguggaacaggaaaaggauuuccaauugcgucgccgacuauagcguucucuauaacagcgccucauuuagcacgu
uuaaguguuacgggguuaguccgaccaaacucaaugacuuguguuuuaccaaugucuaugcagacuccuuuguuauuag
aggcgacgaggucagacaaauugcccccggacagacagguaagauugcagauuauaauuauaaacugccggacgacuuca
cgggguguguuauugcauggaacuccaauaaccuggacucuaaaguaggcgggaacuauaacuaucuguaucgccuguu
ucgcaaaucuaaccugaaacccuucugcagggacauauguacugaaauauaucaagcuggcagcacaccuuguaauggcg
ucgagggauucaauuguuacuucccacuucaaucuuacgguuuucagccuacuaacggcguaggguaucaacccuauag
aguuguagugcucucuuucgaauugcuccaugcccccgcgacuguuuguggaccuaagaaguccacgaaccugguaaag
aacaaguguguuaauuuuaauuuuaauggacugaccgggacuggagugcugacugaaaguaacaagaaauuucugccuu
uccaacaauuuggccgcgauaucgcugauaccaccgacgccgucagagauccgcagacucucgaaauccuggacaucacg
cccugcucauucggcgggguuagcguuauuacuccaggcacuaacacuagcaaucaaguugcaguucuguaccaggaug
ugaacuguaccgaaguccccgucgccauucaugccgaucagcugaccccgacuuggcggguauauucaaccggcagcaau
gucuuucaaacaagggcggguugucucaucggagcggagcauguaaauaauaguuaugaaugcgacauccccauuggcg
cggggaucugugcuucauaucaaacucaaaccaauuccccacggcggagacgaucaguagccagucaaucaauaauugcg
uauacgaugagucuuggggcagaaaauagcguggcuuauucuaauaauagcaucgcuauaccuacaaauuuuacaauca
guguaacuaccgaaauccuuccugucagcaugaccaaaacuagcguagauugcacgauguauauuugcggagacucaacu
gagugcaguaaccuguuguugcaauacggaaguuucuguacccagcugaaccgcgcucuuacgggcauugcaguagaac
aagauaagaauacccaagaaguguuugcccaggugaaacaaaucuacaagacucccccgauuaaagacuuuggcggguuc
aacuucagccagauauugcccgacccgucucgucguagacgguccuuuauugaagaccugcucuucaacaaggucacacu
ggcugaugcagguuuuauuaagcaauacggcgacugucuuggcgacaucgccgcuagggaccuuauaugugcucagaaa
uucaauggucugacaguucugccacccuugcucacugacgaaaugaucgcucaauauacaagcgccuugcuggcuggga
cuauuacuuccggauggacauucggggcgggugccgccuugcaaauuccuuuugcaaugcaaauggcauaccguuucaa
cggaaucggcguaacccagaaugugcucuaugaaaaccagaaauugauagcaaaucaauuuaacucagccauaggaaaga
uucaagacucucucagcucaaccgcgagugcucucggcaagcuccaagacguaguaaaucaaaaugcacaagcuuugaac
acuuugguaaagcaauugucuuccaacuucggggcgaucucaucuggcccuaacgacauccugucccgguugcccaaag
uggaagccgaggugcagaucgaccgccucaucaccggccgacuucaaucacuccaaaccuacgugacucaacaacugauc
cgggcagccgagauaagggcgagugcaaacuuggcagcuacgaaaaugucagaauguguucucggccagaguaaacggg
uagacuuuugugggaaagguuaucacuugaugucuuucccucaaagcgcuccucacggcgucgucuucuugcaugugac
uuacgugccagcucaagaaaagaacuucaccaccgccccugcuauaugccaugacgguaaagcucacuucccccgagagg
gcguguucguuaguaauggaacccauugguuugugacucaacgaaacuuuuaugaaccucaaauaauuaccacggauaa
cacuuuuguuagugguaauugugacguggugaucggcauugugaauaacacagucuacgauccucugcaaccagaacug
gacagcuuuaaagaggaacuugacaaauauuucaagaaccauacaagccccgacgucgaccugggcgacaucaguggaau
caaugcguccguagucaauauccagaaggagauugaucggcuuaaugaagucgcuaagaauuugaaugaaagucuuaua
gaucugcaagaacucgggaaguacgagcaauauauuaaauggccuugguccggacguagaaggcgcaggcggggcucag
gcgguucagggucaggguauauucccgaggcgccacgcgaugggcaagcguacgugcguaaagauggcgaaugggugu
ugcuuuccacauucuuggggugauaa (SEQ ID NO: 108)
MDWTWILFLVAAATRVHSMFVFLVLLPLVSSQCVNLTTRTQLPPAYTNSFTRGVYY
PDKVFRSSVLHSTQDLFLPFFSNVTWFHAIHVSGTNGTKRFDNPVLPFNDGVYFASTE
KSNIIRGWIFGTTLDSKCQSLLIVNNATNVVIKVCEFQFCNDPFLGVYYHKNNKSWM
ESEFRVYSSANNCTFEYVSQPFLMDLEGKQGNFKNLREFVFKNID [symbol] YFKIYSKHTPIN
LVRDLPQGFSALEPLVDLPIGINITRFQTLLALHRSYLTPGDSSSGWTAGAAAYYVGY
LQPRTFLLKYNENGTITDAVDCALDPLSETKCTLKSFTVEKGIYQTSNFRVQPTESIVR
FPNITNLCPFGEVFNATRFASVYAWNRKRISNCVADYSVLYNSASFSTFKCYGVSPTK
LNDLCFTNVYADSFVIRGDEVRQIAPGQTGKIADYNYKLPDDFTGCVIAWNSNNLDS
KVGGNYNYLYRLFRKSNLKPF [symbol] RDI [symbol] TEIYQAGSTPCNGVEGFNCYFPLQSYGFQPT
NGVGYQPYRVVVLSFELLHAPATVCGPKKSTNLVKNKCVNFNFNGLTGTGVLTESN
KKFLPFQQFGRDIADTTDAVRDPQTLEILDITPCSFGGVSVITPGTNTSNQVAVLYQD
VNCTEVPVAIHADQLTPTWRVYSTGSNVFQTRAGCLIGAEHVNNSYECDIPIGAGICA
SYQTQTNSPRR [symbol] RSVASQSIIAYTMSLGAENSVAYSNNSIAIPTNFTISVTTEILPVSMT
KTSVDCTMYICGDSTECSNLLLQYGSFCTQLNRALTGIAVEQDKNTQEVFAQVKQIY
KTPPIKDFGGFNFSQILPDPS [symbol] RSFIEDLLFNKVTLADAGFIKQYGDCLGDIAARDLI
CAQKFNGLTVLPPLLTDEMIAQYTSALLAGTITSGWTFGAGAALQIPFAMQMAYRFN
GIGVTQNVLYENQKLIANQFNSAIGKIQDSLSSTASALGKLQDVVNQNAQALNTLVK
QLSSNFGAISS [symbol] NDILSRL [symbol] KVEAEVQIDRLITGRLQSLQTYVTQQLIRAAEIRASANL
AATKMSECVLGQSKRVDFCGKGYHLMSFPQSAPHGVVFLHVTYVPAQEKNFTTAPA
ICHDGKAHFPREGVFVSNGTHWFVTQRNFYEPQIITTDNTFVSGNCDVVIGIVNNTVY
DPLQPELDSFKEELDKYFKNHTSPDVDLGDISGINASVVNIQKEIDRLNEVAKNLNES
LIDLQELGKYEQYIKWPWSGRRRRRRGSGGSGSGYIPEAPRDGQAYVRKDGEWVLL
STFLG** (SEQ ID NO: 109)
WuS_DownDS3_D2P_F_NoTriCle_pVax
gccaccatggactggacctggatactctttctcgtagcagcagccacacgagtgcattcaatgttcgtgttcctcgtgctcctgcctctcg
ttagcagccaatgtgttaatctcaccaccagaacacagctcccacccgcgtatactaactcttttacgaggggagtttattatcccgataa
ggttttccggtctagcgtactccactccacccaagatctgttcctgcctttctttagcaacgtgacgtggtttcatgcaatccacgtgagtg
gcaccaatggaaccaagcggttcgataatcctgtgttgccgtttaacgatggcgtgtattttgcctcaactgaaaagtctaacataatacg
cggctggatcttcgggaccacattggatagtaagtgtcaatctctgcttatcgtgaacaacgctactaacgtcgttataaaggtctgtgag
ttccaattctgcaacgacccattcctgggtgtgtattaccacaagaataataaatcttggatggagtctgagtttcgcgtatactcttctgcta
acaactgcacctttgaatatgtaagtcaaccattcctcatggatctggaaggaaaacaaggcaactttaagaacttgcgggaatttgtctt
caagaacatcgactgttattttaaaatttactcaaaacacaccccgattaatctggtccgcgatttgccccaagggttctctgcattggaac
cccttgtggacttgcctataggaattaatatcacccgctttcaaactcttctggcgctgcaccgtagctacctgacaccaggagatagctc
tagtggctggactgctggagccgcggcatattatgtggggtatctgcagccacgtacatttctcctcaaatataatgaaaatggtacaata
acggatgcagtcgactgcgcattggaccctctgagtgaaacaaaatgcactctcaagagcttcactgttgaaaagggcatataccaaa
catctaattttagagtccaacccactgaatccattgtccgatttcctaatattacaaacctctgcccatttggagaagtgttcaacgccacta
ggtttgcatccgtgtacgcatggaacagaaaacgaatttctaattgtgtggcagactatagcgtgctgtataactcagcaagctttagcac
atttaagtgttatggagttagcccaaccaaattgaatgatctttgtttcacgaacgtgtacgccgatagcttcgttattcgaggggacgagg
tgaggcaaatcgctccaggtcaaaccggtaaaatcgccgattacaattataaacttcctgatgacttcactggctgtgtcatagcatgga
actctaataatctcgacagcaaggtcggtgggaactataactatctttatcgactctttagaaagagtaatctcaaaccattttgcagagac
atttgtacagagatttatcaggcagggagcacaccatgtaatggggtcgagggcttcaactgttacttccccctgcaatcttatgggttcc
agccgaccaatggagtgggctaccaaccttatcgcgtggtggtcctgtcttttgaactgcttcatgctccagccaccgtatgcggcccta
agaagtctacaaatttggtcaagaacaagtgcgtcaattttaacttcaatggtctgactggaaccggtgtcctcacagaatctaacaagaa
atttctgccatttcaacaatttggaagagatatcgcggatactacggatgctgttagggacccccaaacacttgaaattctcgacattaca
ccctgttcctttggcggggtcagtgtcattaccccgggtacaaatactagtaaccaagtcgcagtactgtatcaagatgttaattgtaccg
aagtgccggtagcaatacacgctgatcaacttacaccaacatggcgagtgtattctacggggagtaatgtcttccaaacgcgggccgg
gtgtctgattggcgcggaacacgtaaacaactcctacgaatgtgatattccaataggcgcaggcatatgtgcgagctatcaaacacaaa
ctaactcccctagacggcgtcggagtgtggctagtcaatcaatcattgcctatacaatgtctctgggagcagaaaacagcgtggcatatt
ccaataattccatcgctatacctaccaactttaccatcagcgtcactactgagattcttcccgtctccatgacgaaaacttccgttgattgta
ctatgtacatctgcggagacagcaccgaatgcagtaaccttctcttgcaatatggcagcttttgtactcagctcaacagagctctcacag
gtattgccgtcgaacaagataagaacacccaagaggtgttcgcccaggtgaaacagatatataagaccccacccatcaaggatttcgg
cgggtttaattttagtcaaatcctgcccgatccctcacggcgtcgcaggtcctttattgaagatcttctgttcaataaggtcacactcgctga
cgcaggctttatcaagcagtatggagattgtctgggcgatatagctgcgagggacttgatctgcgcacaaaagttcaacggccttacag
tgctgcccccgttgctgacagatgagatgattgcgcaatacacttccgcgcttctcgcagggaccatcacgagcggctggacgttcgg
cgctggcgccgctctgcaaatcccgtttgcaatgcaaatggcctataggtttaatggtatcggtgtaacgcaaaacgtactttatgaaaac
cagaaactgatcgctaaccaattcaattccgctattggcaaaattcaagacagcctcagcagcacggctagtgcactgggtaaactcca
agacgtggtgaaccaaaatgcccaagcattgaatacacttgtcaagcaacttagttccaacttcggtgcaatttcaagtggtccaaatga
catacttagcaggctgcctaaagtagaagccgaagtgcaaatcgatagacttatcaccggccgcctgcaatcccttcaaacatacgtga
ctcagcagcttatcagggctgctgagattcgagcaagtgcgaacctggccgccaccaaaatgagtgagtgcgtccttgggcaatcca
agcgcgttgacttttgtggtaaggggtatcatctcatgagcttcccccaatccgcccctcacggagtagtgtttctccatgtgacgtatgtt
cctgcacaagagaagaacttcacaacggctccggctatatgtcatgacggaaaagcgcactttcctcgcgaaggagtgtttgtgtcaaa
tggaacgcactggttcgtgacgcaaaggaatttctacgagcctcaaatcatcactacagataatacttttgtctctgggaattgcgacgtg
gtcattggaatcgtcaacaatacggtttacgatcccctgcaaccagaactggattcattcaaagaagaactcgacaagtacttcaagaat
cataccagtcctgatgtggatctgggcgatatcagtgggatcaatgcaagcgttgtcaacattcaaaaggaaatagaccgcctcaacga
agtcgcaaagaatctcaatgaaagccttattgatcttcaagagctcggaaaatatgagcaatatattaagtggccttggtccggcggctc
aggcggaagtggctcaggatatattcctgaggctccccgagatggacaagcatacgtgagaaaagatggggagtgggtgttgctga
gtacgttccttggatgataa (SEQ ID NO: 110)
gccaccauggacuggaccuggauacucuuucucguagcagcagccacacgagugcauucaauguucguguuccucgugc
uccugccucucguuagcagccaauguguuaaucucaccaccagaacacagcucccacccgcguauacuaacucuuuuacg
aggggaguuuauuaucccgauaagguuuuccggucuagcguacuccacuccacccaagaucuguuccugccuuucuuua
gcaacgugacgugguuucaugcaauccacgugaguggcaccaauggaaccaagcgguucgauaauccuguguugccguu
uaacgauggcguguauuuugccucaacugaaaagucuaacauaauacgcggcuggaucuucgggaccacauuggauagu
aagugucaaucucugcuuaucgugaacaacgcuacuaacgucguuauaaaggucugugaguuccaauucugcaacgacc
cauuccuggguguguauuaccacaagaauaauaaaucuuggauggagucugaguuucgcguauacucuucugcuaacaa
cugcaccuuugaauauguaagucaaccauuccucauggaucuggaaggaaaacaaggcaacuuuaagaacuugcgggaau
uugucuucaagaacaucgacuguuauuuuaaaauuuacucaaaacacaccccgauuaaucugguccgcgauuugccccaa
ggguucucugcauuggaaccccuuguggacuugccuauaggaauuaauaucacccgcuuucaaacucuucuggcgcugc
accguagcuaccugacaccaggagauagcucuaguggcuggacugcuggagccgcggcauauuaugugggguaucugca
gccacguacauuucuccucaaauauaaugaaaaugguacaauaacggaugcagucgacugcgcauuggacccucugagug
aaacaaaaugcacucucaagagcuucacuguugaaaagggcauauaccaaacaucuaauuuuagaguccaacccacugaa
uccauuguccgauuuccuaauauuacaaaccucugcccauuuggagaaguguucaacgccacuagguuugcauccgugu
acgcauggaacagaaaacgaauuucuaauuguguggcagacuauagcgugcuguauaacucagcaagcuuuagcacauu
uaaguguuauggaguuagcccaaccaaauugaaugaucuuuguuucacgaacguguacgccgauagcuucguuauucga
ggggacgaggugaggcaaaucgcuccaggucaaaccgguaaaaucgccgauuacaauuauaaacuuccugaugacuucac
uggcugugucauagcauggaacucuaauaaucucgacagcaaggucggugggaacuauaacuaucuuuaucgacucuuu
agaaagaguaaucucaaaccauuuugcagagacauuuguacagagauuuaucaggcagggagcacaccauguaaugggg
ucgagggcuucaacuguuacuucccccugcaaucuuauggguuccagccgaccaauggagugggcuaccaaccuuaucg
cguggugguccugucuuuugaacugcuucaugcuccagccaccguaugcggcccuaagaagucuacaaauuuggucaag
aacaagugcgucaauuuuaacuucaauggucugacuggaaccgguguccucacagaaucuaacaagaaauuucugccauu
ucaacaauuuggaagagauaucgcggauacuacggaugcuguuagggacccccaaacacuugaaauucucgacauuacac
ccuguuccuuuggcggggucagugucauuaccccggguacaaauacuaguaaccaagucgcaguacuguaucaagaugu
uaauuguaccgaagugccgguagcaauacacgcugaucaacuuacaccaacauggcgaguguauucuacggggaguaau
gucuuccaaacgcgggccgggugucugauuggcgcggaacacguaaacaacuccuacgaaugugauauuccaauaggcg
caggcauaugugcgagcuaucaaacacaaacuaacuccccuagacggcgucggaguguggcuagucaaucaaucauugcc
uauacaaugucucugggagcagaaaacagcguggcauauuccaauaauuccaucgcuauaccuaccaacuuuaccaucag
cgucacuacugagauucuucccgucuccaugacgaaaacuuccguugauuguacuauguacaucugcggagacagcacc
gaaugcaguaaccuucucuugcaauauggcagcuuuuguacucagcucaacagagcucucacagguauugccgucgaac
aagauaagaacacccaagagguguucgcccaggugaaacagauauauaagaccccacccaucaaggauuucggcggguuu
aauuuuagucaaauccugcccgaucccucacggcgucgcagguccuuuauugaagaucuucuguucaauaaggucacac
ucgcugacgcaggcuuuaucaagcaguauggagauugucugggcgauauagcugcgagggacuugaucugcgcacaaaa
guucaacggccuuacagugcugcccccguugcugacagaugagaugauugcgcaauacacuuccgcgcuucucgcaggg
accaucacgagcggcuggacguucggcgcuggcgccgcucugcaaaucccguuugcaaugcaaauggccuauagguuua
augguaucgguguaacgcaaaacguacuuuaugaaaaccagaaacugaucgcuaaccaauucaauuccgcuauuggcaaa
auucaagacagccucagcagcacggcuagugcacuggguaaacuccaagacguggugaaccaaaaugcccaagcauugaa
uacacuugucaagcaacuuaguuccaacuucggugcaauuucaagugguccaaaugacauacuuagcaggcugccuaaag
uagaagccgaagugcaaaucgauagacuuaucaccggccgccugcaaucccuucaaacauacgugacucagcagcuuauc
agggcugcugagauucgagcaagugcgaaccuggccgccaccaaaaugagugagugcguccuugggcaauccaagcgcg
uugacuuuugugguaagggguaucaucucaugagcuucccccaauccgccccucacggaguaguguuucuccaugugac
guauguuccugcacaagagaagaacuucacaacggcuccggcuauaugucaugacggaaaagcgcacuuuccucgcgaag
gaguguuugugucaaauggaacgcacugguucgugacgcaaaggaauuucuacgagccucaaaucaucacuacagauaa
uacuuuugucucugggaauugcgacguggucauuggaaucgucaacaauacgguuuacgauccccugcaaccagaacug
gauucauucaaagaagaacucgacaaguacuucaagaaucauaccaguccugauguggaucugggcgauaucaguggga
ucaaugcaagcguugucaacauucaaaaggaaauagaccgccucaacgaagucgcaaagaaucucaaugaaagccuuauu
gaucuucaagagcucggaaaauaugagcaauauauuaaguggccuugguccggcggcucaggcggaaguggcucaggau
auauuccugaggcuccccgagauggacaagcauacgugagaaaagauggggaguggguguugcugaguacguuccuug
gaugauaa (SEQ ID NO: 111)
MDWTWILFLVAAATRVHSMFVFLVLLPLVSSQCVNLTTRTQLPPAYTNSFTRGVYY
PDKVFRSSVLHSTQDLFLPFFSNVTWFHAIHVSGTNGTKRFDNPVLPFNDGVYFASTE
KSNIIRGWIFGTTLDSK [symbol] QSLLIVNNATNVVIKVCEFQFCNDPFLGVYYHKNNKSWM
ESEFRVYSSANNCTFEYVSQPFLMDLEGKQGNFKNLREFVFKNID [symbol] YFKIYSKHTPIN
LVRDLPQGFSALEPLVDLPIGINITRFQTLLALHRSYLTPGDSSSGWTAGAAAYYVGY
LQPRTFLLKYNENGTITDAVDCALDPLSETKCTLKSFTVEKGIYQTSNFRVQPTESIVR
FPNITNLCPFGEVFNATRFASVYAWNRKRISNCVADYSVLYNSASFSTFKCYGVSPTK
LNDLCFTNVYADSFVIRGDEVRQIAPGQTGKIADYNYKLPDDFTGCVIAWNSNNLDS
KVGGNYNYLYRLFRKSNLKPF [symbol] RDI [symbol] TEIYQAGSTPCNGVEGFNCYFPLQSYGFQPT
NGVGYQPYRVVVLSFELLHAPATVCGPKKSTNLVKNKCVNFNFNGLTGTGVLTESN
KKFLPFQQFGRDIADTTDAVRDPQTLEILDITPCSFGGVSVITPGTNTSNQVAVLYQD
VNCTEVPVAIHADQLTPTWRVYSTGSNVFQTRAGCLIGAEHVNNSYECDIPIGAGICA
SYQTQTNSPRR [symbol] RSVASQSIIAYTMSLGAENSVAYSNNSIAIPTNFTISVTTEILPVSMT
KTSVDCTMYICGDSTECSNLLLQYGSFCTQLNRALTGIAVEQDKNTQEVFAQVKQIY
KTPPIKDFGGFNFSQILPDPS [symbol] RSFIEDLLFNKVTLADAGFIKQYGDCLGDIAARDLI
CAQKFNGLTVLPPLLTDEMIAQYTSALLAGTITSGWTFGAGAALQIPFAMQMAYRFN
GIGVTQNVLYENQKLIANQFNSAIGKIQDSLSSTASALGKLQDVVNQNAQALNTLVK
QLSSNFGAISS [symbol] NDILSRL [symbol] KVEAEVQIDRLITGRLQSLQTYVTQQLIRAAEIRASANL
AATKMSECVLGQSKRVDFCGKGYHLMSFPQSAPHGVVFLHVTYVPAQEKNFTTAPA
ICHDGKAHFPREGVFVSNGTHWFVTQRNFYEPQIITTDNTFVSGNCDVVIGIVNNTVY
DPLQPELDSFKEELDKYFKNHTSPDVDLGDISGINASVVNIQKEIDRLNEVAKNLNES
LIDLQELGKYEQYIKWPWSGGSGGSGSGYIPEAPRDGQAYVRKDGEWVLLSTFLG**
(SEQ ID NO: 112)
WuS_DownDS2_2P_pVax
gccaccatggactggacctggatactctttctcgtagcagcagccacacgagtgcattcaatgttcgtgttcttggtgctgctgcctcttgt
ctcatcacagtgcgttaatctgaccacccgtacacaactcccacccgcatacacaaatagctttacacgcggagtgtattaccccgataa
agtctttcggagctcagtgctccattctactcaagatcttttcctgccgttctttagtaacgttacttggtttcatgcaatacatgtgtctggca
caaacggaaccaaacgttttgataatccggtgttgccatttaatgatggtgtatattttgcttccacggaaaagtcaaacatcatccgtggg
tggatctttggcaccactcttgatagcaaatgtcaaagccttctgattgttaataacgctacaaacgtcgtaattaaagtgtgtgaattccag
ttctgtaatgaccccttcctcggagtatattaccacaagaataacaaatcttggatggagagcgaatttagagtttacagttcagccaataa
ctgtacatttgaatatgtcagtcagcctttcctcatggacctcgaaggtaaacaaggtaattttaagaacttgagagagttcgtgtttaagaa
catcgatggctatttcaaaatttactctaagcacacaccaatcaacctggttcgagacctgccccagggtttctcagctttggaaccattg
gtggacctgccaatcggcattaacattaccagatttcaaactttgttggcactccaccggtcatatcttacccccggagacagttcctcag
gctggacggcaggcgccgccgcgtactatgttgggtatctccaaccccgaaccttccttctcaaatacaatgaaaacgggacgattac
agatgcagtcgattgcgccctggaccccttgtccgaaactaaatgcactctgaagagtttcacggtagagaagggaatctatcaaacga
gcaattttcgagtccaaccaacggaatctattgtgcggtttcccaatatcacaaacctctgtccattcggagaagtctttaatgctaccagg
tttgcgtctgtatatgcatggaaccgaaagaggatttccaattgcgtagcggactacagtgtcctttataacagcgcttcattttccacgttt
aagtgttatggtgtttctccaacgaaactcaacgacctctgttttactaacgtttacgctgacagctttgttatacgtggggacgaagtcag
gcaaattgctcctggacagactggaaagatcgctgattataattataaacttcctgacgatttcaccggctgcgttattgcatggaactcca
acaatctggattcaaaagtgggtggaaattataattatctgtataggttgtttcggaagagcaatcttaagccctttgagcgggacatatgt
accgaaatttaccaagcaggctccaccccatgcaatggagtagaagggttcaattgctattttcctctgcaaagttatggctttcaaccca
ccaacggagttgggtatcaaccttacagggttgtcgtgctgagtttcgaattgctccacgcacccgctacagtatgtggccccaagaag
tccactaatcttgttaagaataaatgcgtgaacttcaacttcaatggacttacaggtactggagtactcacggaatcaaacaagaaatttct
cccatttcaacagtttggccgagatatagctgacaccacagatgctgttcgcgacccccagacgttggaaatacttgatatcactccctg
cagcttcggcggcgtgagcgtgatcactccaggtactaatacgagcaatcaagttgccgttctgtaccaagatgtgaactgcaccgag
gttccagtggcaattcacgccgaccaacttactcccacctggcgggtctattccaccggatcaaacgtcttccaaactcgcgctggttgc
cttatcggtgcagagcacgttaataattcctatgaatgtgacattcccataggagcaggcatctgtgcatcttatcaaacccagactaattc
ccctggttccgcttcctctgttgcatcccagtccataattgcctacactatgagtctcggggctgaaaattccgtggcctattctaataattc
aatcgccatcccaaccaattttaccatatccgtaacgactgaaatacttcctgtcagtatgaccaagacctcagtggactgcaccatgtac
atctgcggcgattctactgaatgttccaatctgcttttgcaatatggttcattctgcacccaactcaacagggctcttacagggatcgccgt
cgaacaggataagaatacccaggaagtgttcgcccaagttaagcaaatttacaagacaccacccatcaaggacttcggcgggttcaa
cttcagccaaattctgcccgacccgtctaagccttctaagcgctctttcattgaggatcttttgttcaataaggttacgcttgccgatgcagg
gtttatcaaacagtatggcgactgtcttggggatatcgcagctagggatcttatttgtgcacagaaatttaatggcctgactgttcttccccc
tttgctcactgacgagatgattgcccagtacacttcagctctcctggccgggactataacttctggttggaccttcggagctggcgccgc
cctgcaaattccatttgcaatgcagatggcttatcgcttcaacggaattggggtgacccaaaatgttctctacgagaaccagaaactcatt
gcaaaccagttcaattctgcgatcgggaagatccaggattccctgtctagtacggctagtgccctcggtaagctccaagacgtcgtcaa
ccaaaacgcccaggccttgaacacccttgtcaaacaactgagctccaattttggggctattagcagtgtgctgaatgatatcctgtcccg
ccttgacccaccggaagcggaagtccaaattgatcgactgatcactgggcgtctccaatcccttcaaacttacgtgacccaacaactca
tccgagcagctgagattagggctagcgctaaccttgctgctactaagatgtcagagtgtgtcctcggccagtctaagagagtggactttt
gtgggaaagggtaccacttgatgtcattcccacaaagcgccccacacggcgtggtgtttctccacgtcacttacgttccagctcaggaa
aagaactttaccaccgcccccgctatatgtcatgatgggaaggcccactttcctcgtgaaggtgtctttgtcagcaatggcacacactgg
tttgtgacccaacggaatttctatgagcctcagattattaccacggataacactttcgtatcagggaattgtgatgtggttatcggcatcgtt
aataatacagtgtatgacccactgcagccagagcttgacagcttcaaagaagagctcgataagtactttaagaatcatacaagtcctgac
gttgatcttggggatattagtgggattaacgccagcgtcgtcaatattcagaaagagattgacaggttgaacgaagtagctaagaatctt
aatgaaagcctgatagatttgcaagaacttggtaagtatgagcaggggtacatacccgaggctcctcgggatgggcaggcctatgtac
gcaaagacggtgaatgggtattgctcagcacttttctcggctgataa (SEQ ID NO: 113)
gccaccauggacuggaccuggauacucuuucucguagcagcagccacacgagugcauucaauguucguguucuuggugc
ugcugccucuugucucaucacagugcguuaaucugaccacccguacacaacucccacccgcauacacaaauagcuuuaca
cgcggaguguauuaccccgauaaagucuuucggagcucagugcuccauucuacucaagaucuuuuccugccguucuuua
guaacguuacuugguuucaugcaauacaugugucuggcacaaacggaaccaaacguuuugauaauccgguguugccauu
uaaugaugguguauauuuugcuuccacggaaaagucaaacaucauccguggguggaucuuuggcaccacucuugauagc
aaaugucaaagccuucugauuguuaauaacgcuacaaacgucguaauuaaagugugugaauuccaguucuguaaugacc
ccuuccucggaguauauuaccacaagaauaacaaaucuuggauggagagcgaauuuagaguuuacaguucagccaauaac
uguacauuugaauaugucagucagccuuuccucauggaccucgaagguaaacaagguaauuuuaagaacuugagagagu
ucguguuuaagaacaucgauggcuauuucaaaauuuacucuaagcacacaccaaucaaccugguucgagaccugccccag
gguuucucagcuuuggaaccauugguggaccugccaaucggcauuaacauuaccagauuucaaacuuuguuggcacucc
accggucauaucuuacccccggagacaguuccucaggcuggacggcaggcgccgccgcguacuauguuggguaucucca
accccgaaccuuccuucucaaauacaaugaaaacgggacgauuacagaugcagucgauugcgcccuggaccccuuguccg
aaacuaaaugcacucugaagaguuucacgguagagaagggaaucuaucaaacgagcaauuuucgaguccaaccaacggaa
ucuauugugcgguuucccaauaucacaaaccucuguccauucggagaagucuuuaaugcuaccagguuugcgucuguau
augcauggaaccgaaagaggauuuccaauugcguagcggacuacaguguccuuuauaacagcgcuucauuuuccacguu
uaaguguuaugguguuucuccaacgaaacucaacgaccucuguuuuacuaacguuuacgcugacagcuuuguuauacgu
ggggacgaagucaggcaaauugcuccuggacagacuggaaagaucgcugauuauaauuauaaacuuccugacgauuuca
ccggcugcguuauugcauggaacuccaacaaucuggauucaaaaguggguggaaauuauaauuaucuguauagguuguu
ucggaagagcaaucuuaagcccuuugagcgggacauauguaccgaaauuuaccaagcaggcuccaccccaugcaauggag
uagaaggguucaauugcuauuuuccucugcaaaguuauggcuuucaacccaccaacggaguuggguaucaaccuuacag
gguugucgugcugaguuucgaauugcuccacgcacccgcuacaguauguggccccaagaaguccacuaaucuuguuaag
aauaaaugcgugaacuucaacuucaauggacuuacagguacuggaguacucacggaaucaaacaagaaauuucucccauu
ucaacaguuuggccgagauauagcugacaccacagaugcuguucgcgacccccagacguuggaaauacuugauaucacuc
ccugcagcuucggcggcgugagcgugaucacuccagguacuaauacgagcaaucaaguugccguucuguaccaagaugu
gaacugcaccgagguuccaguggcaauucacgccgaccaacuuacucccaccuggcgggucuauuccaccggaucaaacg
ucuuccaaacucgcgcugguugccuuaucggugcagagcacguuaauaauuccuaugaaugugacauucccauaggagc
aggcaucugugcaucuuaucaaacccagacuaauuccccugguuccgcuuccucuguugcaucccaguccauaauugccu
acacuaugagucucggggcugaaaauuccguggccuauucuaauaauucaaucgccaucccaaccaauuuuaccauaucc
guaacgacugaaauacuuccugucaguaugaccaagaccucaguggacugcaccauguacaucugcggcgauucuacuga
auguuccaaucugcuuuugcaauaugguucauucugcacccaacucaacagggcucuuacagggaucgccgucgaacag
gauaagaauacccaggaaguguucgcccaaguuaagcaaauuuacaagacaccacccaucaaggacuucggcggguucaa
cuucagccaaauucugcccgacccgucuaagccuucuaagcgcucuuucauugaggaucuuuuguucaauaagguuacg
cuugccgaugcaggguuuaucaaacaguauggcgacugucuuggggauaucgcagcuagggaucuuauuugugcacag
aaauuuaauggccugacuguucuucccccuuugcucacugacgagaugauugcccaguacacuucagcucuccuggccg
ggacuauaacuucugguuggaccuucggagcuggcgccgcccugcaaauuccauuugcaaugcagauggcuuaucgcuu
caacggaauuggggugacccaaaauguucucuacgagaaccagaaacucauugcaaaccaguucaauucugcgaucggga
agauccaggauucccugucuaguacggcuagugcccucgguaagcuccaagacgucgucaaccaaaacgcccaggccuug
aacacccuugucaaacaacugagcuccaauuuuggggcuauuagcagugugcugaaugauauccugucccgccuugacc
caccggaagcggaaguccaaauugaucgacugaucacugggcgucuccaaucccuucaaacuuacgugacccaacaacuc
auccgagcagcugagauuagggcuagcgcuaaccuugcugcuacuaagaugucagaguguguccucggccagucuaaga
gaguggacuuuugugggaaaggguaccacuugaugucauucccacaaagcgccccacacggcgugguguuucuccacgu
cacuuacguuccagcucaggaaaagaacuuuaccaccgcccccgcuauaugucaugaugggaaggcccacuuuccucgug
aaggugucuuugucagcaauggcacacacugguuugugacccaacggaauuucuaugagccucagauuauuaccacgga
uaacacuuucguaucagggaauugugaugugguuaucggcaucguuaauaauacaguguaugacccacugcagccagag
cuugacagcuucaaagaagagcucgauaaguacuuuaagaaucauacaaguccugacguugaucuuggggauauuagug
ggauuaacgccagcgucgucaauauucagaaagagauugacagguugaacgaaguagcuaagaaucuuaaugaaagccu
gauagauuugcaagaacuugguaaguaugagcagggguacauacccgaggcuccucgggaugggcaggccuauguacgc
aaagacggugaauggguauugcucagcacuuuucucggcugauaa (SEQ ID NO: 114)
MDWTWILFLVAAATRVHSMFVFLVLLPLVSSQCVNLTTRTQLPPAYTNSFTRGVYY
PDKVFRSSVLHSTQDLFLPFFSNVTWFHAIHVSGTNGTKRFDNPVLPFNDGVYFASTE
KSNIIRGWIFGTTLDSK [symbol] QSLLIVNNATNVVIKVCEFQFCNDPFLGVYYHKNNKSWM
ESEFRVYSSANNCTFEYVSQPFLMDLEGKQGNFKNLREFVFKNIDGYFKIYSKHTPIN
LVRDLPQGFSALEPLVDLPIGINITRFQTLLALHRSYLTPGDSSSGWTAGAAAYYVGY
LQPRTFLLKYNENGTITDAVDCALDPLSETKCTLKSFTVEKGIYQTSNFRVQPTESIVR
FPNITNLCPFGEVFNATRFASVYAWNRKRISNCVADYSVLYNSASFSTFKCYGVSPTK
LNDLCFTNVYADSFVIRGDEVRQIAPGQTGKIADYNYKLPDDFTGCVIAWNSNNLDS
KVGGNYNYLYRLFRKSNLKPFERDI [symbol] TEIYQAGSTPCNGVEGFNCYFPLQSYGFQPT
NGVGYQPYRVVVLSFELLHAPATVCGPKKSTNLVKNKCVNFNFNGLTGTGVLTESN
KKFLPFQQFGRDIADTTDAVRDPQTLEILDITPCSFGGVSVITPGTNTSNQVAVLYQD
VNCTEVPVAIHADQLTPTWRVYSTGSNVFQTRAGCLIGAEHVNNSYECDIPIGAGICA
SYQTQTNSP [symbol] A [symbol] SVASQSIIAYTMSLGAENSVAYSNNSIAIPTNFTISVTTEILPVSMT
KTSVDCTMYICGDSTECSNLLLQYGSFCTQLNRALTGIAVEQDKNTQEVFAQVKQIY
KTPPIKDFGGFNFSQILPDPSKPSKRSFIEDLLFNKVTLADAGFIKQYGDCLGDIAARD
LICAQKFNGLTVLPPLLTDEMIAQYTSALLAGTITSGWTFGAGAALQIPFAMQMAYR
FNGIGVTQNVLYENQKLIANQFNSAIGKIQDSLSSTASALGKLQDVVNQNAQALNTL
VKQLSSNFGAISSVLNDILSRLD [symbol] EAEVQIDRLITGRLQSLQTYVTQQLIRAAEIRASA
NLAATKMSECVLGQSKRVDFCGKGYHLMSFPQSAPHGVVFLHVTYVPAQEKNFTT
APAICHDGKAHFPREGVFVSNGTHWFVTQRNFYEPQIITTDNTFVSGNCDVVIGIVNN
TVYDPLQPELDSFKEELDKYFKNHTSPDVDLGDISGINASVVNIQKEIDRLNEVAKNL
NESLIDLQELGKYEQGYIPEAPRDGQAYVRKDGEWVLLSTFLG** (SEQ ID NO: 115)
WuSDownDS1_2P_pVax
gccaccatggactggacctggatactctttctcgtagcagcagccacacgagtgcattcaatgtttgttttccttgttctgctcccgcttgtg
tcttcccagtgcgtgaacctgaccacccgaactcaactcccaccagcatacaccaactcatttacaagaggagtttattacccggacaa
ggtatttcgaagttcagttcttcacagcacccaagacctgtttctgccattcttcagtaatgtcacttggtttcacgcgatacatgtcagcgg
tacaaacgggacaaagcgattcgataacccagtactcccattcaacgacggagtgtattttgcatctacagagaaatccaacattatacg
cgggtggatctttggaactactctggactccaagacacagagcctgctcattgtgaacaatgcaacgaatgtcgtcataaaagtctgtga
atttcaattttgcaacgatcctttcctcggagtctattaccataagaacaataagagttggatggagagtgagtttcgcgtctattcttccgc
gaacaattgtacatttgaatatgtatcacaaccctttcttatggatttggaaggcaaacaaggtaacttcaagaacttgcgcgagttcgtgtt
caagaacatagactgttattttaagatctatagtaagcatacgccaatcaatctggtgcgagatttgcctcagggcttttctgctcttgaacc
cttggttgatctgcccatcgggatcaacataaccagatttcaaacgttgctcgcactccaccgcagctatctcactcctggcgattcctcat
ctgggtggaccgccggagctgctgcttattacgtcggctatctccagccgcgtactttcctgctcaagtataatgagaatggcaccatta
ccgatgctgtggattgtgctcttgatccactctctgaaaccaaatgcactctcaagtcttttaccgtggaaaagggtatttatcagacatcta
attttcgggtgcaacctactgagtcaattgtacggtttcctaacataactaacctttgtccatttggggaagtcttcaatgccacgcggttcg
catcagtctatgcatggaacagaaaacgtatctccaactgcgtcgccgattattccgtcctttacaatagcgctagcttttccacattcaaat
gttatggcgtatcaccaaccaaacttaacgatctctgctttactaatgtctacgctgactctttcgttattcgaggtgacgaggtgcgccaa
attgcgcctggtcaaaccggaaagattgccgattataactacaagctccccgacgactttacgggttgtgtgatcgcctggaatagcaat
aacctcgattctaaagttggcggtaattataactatctgtacagactctttaggaaaagtaatctcaagcccttttgcagggatatctcaacc
gaaatctaccaagccggcagcactccttgcaatggtgtcgaggggtttaattgttatttcccactgcaatcttacggctttcaaccgactaa
tggagtcggttatcaaccctatagggtggtggtactctcctttgaacttttgcacgctccggcaacagtttgtggaccaaagaaaagtacg
aaccttgttaagaataagtgtgttaatttcaattttaacggcctcactggaacaggtgtcctcacagaaagcaacaagaagtttctccctttc
caacagtttggacgggatatcgccgacactactgacgccgtcagagatcctcaaactctcgaaatcttggatatcacaccatgttctttcg
gtggtgtctccgtcataacaccaggaactaacacctctaatcaagtggccgtgctctatcaggacgtcaattgcacagaagtgcctgtc
gcaatccatgctgatcagctcactcccacctggcgtgtgtattccactggctctaatgtctttcagacacgggcaggttgccttattgggg
cagagcatgtgaacaattcctacgaatgcgatatacccattggggcaggcatttgcgccagctaccaaacccaaactaacagccccg
ggagtgccagcagcgtggcatctcagtccattattgcctatacgatgagcctgggtgctgaaaatagcgtggcttatagtaataactctat
cgccatacccacaaacttcaccatttcagtgaccaccgaaatccttcctgtttctatgaccaaaacgtccgtcgattgtacaatgtacattt
gcggcgatagcactgaatgttcaaacctgctcctgcaatacggctctttctgtactcagctcaaccgggcactcaccggcatagccgtc
gaacaagacaagaatacccaggaagtctttgcgcaggtgaaacaaatctataagaccccaccaataaaagatttcggcggttttaatttc
agccaaatcttgcctgatcccagcaagccatctaaacggtctttcattgaagatctcctgttcaacaaggttacgctggctgacgccggg
tttattaagcaatatggcgattgccttggggacattgccgcacgagacctcatttgtgcccagaaattcaacgggctcaccgtattgcccc
cgctcctcacagacgaaatgatcgcccaatatacaagcgccctgcttgcgggaaccattacaagcggttggacctttggtgccggcgc
agctctgcaaatacccttcgcaatgcaaatggcatatcggtttaatggaattggcgtaacccaaaacgtgctgtatgaaaaccagaaact
gatcgcaaatcaattcaatagtgctataggaaagatccaagacagtctgtcttccactgctagcgcgctggggaagctccaagacgttg
tgaaccaaaacgcgcaggccctgaataccctggtgaagcaactttcaagcaatttcggtgctatatcttctgtcctcaatgacattctctct
cggctcgatcccccggaagccgaagttcagatagaccgtttgatcacaggccgcttgcaatccctgcaaacctacgttacacaacaac
tgattcgcgccgccgaaattcgggcatccgccaatctggccgcaaccaaaatgtccgagtgtgttctcggtcaatccaaacgcgtgga
tttctgcggaaaaggataccatttgatgtcatttccacaatcagctccacacggtgttgtattcctgcacgtgacctacgtgccagcccag
gagaagaattttactactgcgcccgccatttgtcatgacgggaaggctcattttcctcgggaaggggttttcgtctcaaacggtacccatt
ggttcgtgactcagaggaacttttatgaacctcaaatcataacgaccgataacacgtttgtaagtggcaattgcgacgtggtcatcggga
ttgtaaacaatactgtctatgaccctctccaaccagagcttgacagctttaaagaagagcttgataaatactttaagaaccatacctcacca
gacgtcgatttgggagatatcagtggcattaatgcctctgtcgtcaatatccagaaagagattgaccgcttgaacgaagttgccaagaat
cttaatgagtctctgattgacttgcaagaattgggaaaatatgaacaaggatatattccagaagcccctcgcgatgggcaagcatatgttc
gaaaggatggggaatgggtgctgctcagcacctttctcggttgataa (SEQ ID NO: 116)
gccaccauggacuggaccuggauacucuuucucguagcagcagccacacgagugcauucaauguuuguuuuccuuguuc
ugcucccgcuugugucuucccagugcgugaaccugaccacccgaacucaacucccaccagcauacaccaacucauuuacaa
gaggaguuuauuacccggacaagguauuucgaaguucaguucuucacagcacccaagaccuguuucugccauucuucag
uaaugucacuugguuucacgcgauacaugucagcgguacaaacgggacaaagcgauucgauaacccaguacucccauuca
acgacggaguguauuuugcaucuacagagaaauccaacauuauacgcggguggaucuuuggaacuacucuggacuccaa
gacacagagccugcucauugugaacaaugcaacgaaugucgucauaaaagucugugaauuucaauuuugcaacgauccu
uuccucggagucuauuaccauaagaacaauaagaguuggauggagagugaguuucgcgucuauucuuccgcgaacaauu
guacauuugaauauguaucacaacccuuucuuauggauuuggaaggcaaacaagguaacuucaagaacuugcgcgaguu
cguguucaagaacauagacuguuauuuuaagaucuauaguaagcauacgccaaucaaucuggugcgagauuugccucag
ggcuuuucugcucuugaacccuugguugaucugcccaucgggaucaacauaaccagauuucaaacguugcucgcacucc
accgcagcuaucucacuccuggcgauuccucaucuggguggaccgccggagcugcugcuuauuacgucggcuaucucca
gccgcguacuuuccugcucaaguauaaugagaauggcaccauuaccgaugcuguggauugugcucuugauccacucucu
gaaaccaaaugcacucucaagucuuuuaccguggaaaaggguauuuaucagacaucuaauuuucgggugcaaccuacug
agucaauuguacgguuuccuaacauaacuaaccuuuguccauuuggggaagucuucaaugccacgcgguucgcaucagu
cuaugcauggaacagaaaacguaucuccaacugcgucgccgauuauuccguccuuuacaauagcgcuagcuuuuccacau
ucaaauguuauggcguaucaccaaccaaacuuaacgaucucugcuuuacuaaugucuacgcugacucuuucguuauucg
aggugacgaggugcgccaaauugcgccuggucaaaccggaaagauugccgauuauaacuacaagcuccccgacgacuuua
cggguugugugaucgccuggaauagcaauaaccucgauucuaaaguuggcgguaauuauaacuaucuguacagacucuu
uaggaaaaguaaucucaagcccuuuugcagggauaucucaaccgaaaucuaccaagccggcagcacuccuugcaauggug
ucgagggguuuaauuguuauuucccacugcaaucuuacggcuuucaaccgacuaauggagucgguuaucaacccuauag
gguggugguacucuccuuugaacuuuugcacgcuccggcaacaguuuguggaccaaagaaaaguacgaaccuuguuaag
aauaaguguguuaauuucaauuuuaacggccucacuggaacagguguccucacagaaagcaacaagaaguuucucccuu
uccaacaguuuggacgggauaucgccgacacuacugacgccgucagagauccucaaacucucgaaaucuuggauaucaca
ccauguucuuucgguggugucuccgucauaacaccaggaacuaacaccucuaaucaaguggccgugcucuaucaggacg
ucaauugcacagaagugccugucgcaauccaugcugaucagcucacucccaccuggcguguguauuccacuggcucuaa
ugucuuucagacacgggcagguugccuuauuggggcagagcaugugaacaauuccuacgaaugcgauauacccauuggg
gcaggcauuugcgccagcuaccaaacccaaacuaacagccccgggagugccagcagcguggcaucucaguccauuauugc
cuauacgaugagccugggugcugaaaauagcguggcuuauaguaauaacucuaucgccauacccacaaacuucaccauuu
cagugaccaccgaaauccuuccuguuucuaugaccaaaacguccgucgauuguacaauguacauuugcggcgauagcacu
gaauguucaaaccugcuccugcaauacggcucuuucuguacucagcucaaccgggcacucaccggcauagccgucgaaca
agacaagaauacccaggaagucuuugcgcaggugaaacaaaucuauaagaccccaccaauaaaagauuucggcgguuuua
auuucagccaaaucuugccugaucccagcaagccaucuaaacggucuuucauugaagaucuccuguucaacaagguuacg
cuggcugacgccggguuuauuaagcaauauggcgauugccuuggggacauugccgcacgagaccucauuugugcccaga
aauucaacgggcucaccguauugcccccgcuccucacagacgaaaugaucgcccaauauacaagcgcccugcuugcggga
accauuacaagcgguuggaccuuuggugccggcgcagcucugcaaauacccuucgcaaugcaaauggcauaucgguuua
auggaauuggcguaacccaaaacgugcuguaugaaaaccagaaacugaucgcaaaucaauucaauagugcuauaggaaag
auccaagacagucugucuuccacugcuagcgcgcuggggaagcuccaagacguugugaaccaaaacgcgcaggcccugaa
uacccuggugaagcaacuuucaagcaauuucggugcuauaucuucuguccucaaugacauucucucucggcucgauccc
ccggaagccgaaguucagauagaccguuugaucacaggccgcuugcaaucccugcaaaccuacguuacacaacaacugau
ucgcgccgccgaaauucgggcauccgccaaucuggccgcaaccaaaauguccgaguguguucucggucaauccaaacgcg
uggauuucugcggaaaaggauaccauuugaugucauuuccacaaucagcuccacacgguguuguauuccugcacgugac
cuacgugccagcccaggagaagaauuuuacuacugcgcccgccauuugucaugacgggaaggcucauuuuccucgggaa
gggguuuucgucucaaacgguacccauugguucgugacucagaggaacuuuuaugaaccucaaaucauaacgaccgaua
acacguuuguaaguggcaauugcgacguggucaucgggauuguaaacaauacugucuaugacccucuccaaccagagcu
ugacagcuuuaaagaagagcuugauaaauacuuuaagaaccauaccucaccagacgucgauuugggagauaucaguggca
uuaaugccucugucgucaauauccagaaagagauugaccgcuugaacgaaguugccaagaaucuuaaugagucucugau
ugacuugcaagaauugggaaaauaugaacaaggauauauuccagaagccccucgcgaugggcaagcauauguucgaaag
gauggggaaugggugcugcucagcaccuuucucgguugauaa(SEQ ID NO: 117)
MDWTWILFLVAAATRVHSMFVFLVLLPLVSSQCVNLTTRTQLPPAYTNSFTRGVYY
PDKVFRSSVLHSTQDLFLPFFSNVTWFHAIHVSGTNGTKRFDNPVLPFNDGVYFASTE
KSNIIRGWIFGTTLDSKTQSLLIVNNATNVVIKVCEFQFCNDPFLGVYYHKNNKSWM
ESEFRVYSSANNCTFEYVSQPFLMDLEGKQGNFKNLREFVFKNID [symbol] YFKIYSKHTPIN
LVRDLPQGFSALEPLVDLPIGINITRFQTLLALHRSYLTPGDSSSGWTAGAAAYYVGY
LQPRTFLLKYNENGTITDAVDCALDPLSETKCTLKSFTVEKGIYQTSNFRVQPTESIVR
FPNITNLCPFGEVFNATRFASVYAWNRKRISNCVADYSVLYNSASFSTFKCYGVSPTK
LNDLCFTNVYADSFVIRGDEVRQIAPGQTGKIADYNYKLPDDFTGCVIAWNSNNLDS
KVGGNYNYLYRLFRKSNLKPF [symbol] RDISTEIYQAGSTPCNGVEGFNCYFPLQSYGFQPTN
GVGYQPYRVVVLSFELLHAPATVCGPKKSTNLVKNKCVNFNFNGLTGTGVLTESNK
KFLPFQQFGRDIADTTDAVRDPQTLEILDITPCSFGGVSVITPGTNTSNQVAVLYQDV
NCTEVPVAIHADQLTPTWRVYSTGSNVFQTRAGCLIGAEHVNNSYECDIPIGAGICAS
YQTQTNSP [symbol] A [symbol] SVASQSIIAYTMSLGAENSVAYSNNSIAIPTNFTISVTTEILPVSMTK
TSVDCTMYICGDSTECSNLLLQYGSFCTQLNRALTGIAVEQDKNTQEVFAQVKQIYK
TPPIKDFGGFNFSQILPDPSKPSKRSFIEDLLFNKVTLADAGFIKQYGDCLGDIAARDLI
CAQKFNGLTVLPPLLTDEMIAQYTSALLAGTITSGWTFGAGAALQIPFAMQMAYRFN
GIGVTQNVLYENQKLIANQFNSAIGKIQDSLSSTASALGKLQDVVNQNAQALNTLVK
QLSSNFGAISSVLNDILSRLD [symbol] EAEVQIDRLITGRLQSLQTYVTQQLIRAAEIRASANL
AATKMSECVLGQSKRVDFCGKGYHLMSFPQSAPHGVVFLHVTYVPAQEKNFTTAPA
ICHDGKAHFPREGVFVSNGTHWFVTQRNFYEPQIITTDNTFVSGNCDVVIGIVNNTVY
DPLQPELDSFKEELDKYFKNHTSPDVDLGDISGINASVVNIQKEIDRLNEVAKNLNES
LIDLQELGKYEQGYIPEAPRDGQAYVRKDGEWVLLSTFLG** (SEQ ID NO: 118)
WuS_2P_pVax
gccaccatggactggacctggatactctttctcgtagcagcagccacacgagtgcattcaatgtttgtgtttcttgtcctgttgccattggtg
agctcccaatgtgtcaatctgaccacccggacacaattgccccctgcatatacaaattcattcacgagaggagtatactatcccgacaaa
gttttccggtcctcagtccttcattccactcaagatcttttccttccattcttttctaacgtaacctggttccatgcaattcatgtcagtgggacc
aacggcacgaaacggtttgataatccagttcttccattcaatgacggagtatattttgcatcaactgagaaatctaatatcattagagggtg
gattttcggaacaactcttgactccaagacccaatccttgctcatcgttaacaatgctacaaatgtggttattaaggtctgtgagtttcaattc
tgtaacgacccctttctcggcgtatactaccataagaataataagtcttggatggagtctgaatttcgtgtctactcatcagcgaacaattgt
acatttgaatatgtgtcccaaccattcctgatggatctcgaaggaaagcagggcaattttaagaaccttcgggagttcgtctttaagaatat
cgatggatactttaaaatatatagtaaacacacaccaatcaatctggtccgagatctcccccagggttttagtgctctggagccgctggtg
gatttgcccatcggtatcaatattacgcgcttccaaacattgctcgccctgcatcggagttaccttacgcctggcgacagtagcagcgga
tggaccgctggagccgccgcctactatgtcgggtaccttcaaccacgcacttttctcctgaaatacaacgaaaatgggacaattacaga
cgctgttgattgcgcactcgatcccctgtcagaaacaaaatgtacacttaaatcttttacggtcgagaaagggatttaccagacatctaac
ttccgagtacaaccaaccgaatctatagtgcggttccccaacattacgaacctgtgcccgttcggcgaagtgttcaacgcaacacgattt
gcttctgtttacgcttggaaccggaaacgcatctccaattgcgtcgccgattacagcgttctttataattctgcatctttctccaccttcaaat
gctatggtgtctctcccacaaaactcaatgacctctgttttaccaatgtgtatgcggactccttcgtcatacgcggcgacgaggtgagaca
aatcgcaccagggcagactggcaagatcgctgattataattacaaactgcctgatgattttaccggatgcgttattgcttggaattctaata
acctcgattccaaagttggcgggaactacaattacctctaccgattgtttcgcaaatctaaccttaagccgtttgagagagatatcagcac
agagatttatcaagctggctctaccccttgcaatggagtagaaggctttaactgctattttcctcttcagtcttatggatttcaacctaccaac
ggggtagggtaccaaccctatagagtcgtcgtgctctcatttgaactccttcacgcccccgctaccgtgtgtgggcctaagaaatccact
aatctcgttaagaataagtgtgtgaattttaatttcaatggcctgacagggaccggggttctgactgaatctaacaagaaatttctgccgtt
ccaacaattcgggcgcgatattgcagacacgaccgacgcggtgcgcgatcctcaaacactcgaaatccttgatatcactccttgttcttt
cggcggtgtaagcgtcattactcctggcaccaatacctctaaccaagtggcagtactctatcaagatgtgaactgcactgaggtcccgg
ttgcaatacatgcggatcaactcaccccaacatggcgagtgtattccacagggagcaatgtgtttcaaacgagggccggctgtctcatt
ggggccgaacacgttaataatagttatgagtgcgatattcccattggagcgggcatttgtgccagctatcagacccaaactaactcccc
cgggtccgcctcatcagtcgctagccaatctattattgcgtacacaatgtccctgggagctgaaaacagcgtggcctactcaaataaca
gcattgcaatacccacaaattttacgatttcagtaaccactgaaatcctgcccgtctccatgaccaaaacctctgtcgactgcactatgtac
atatgcggcgactccaccgagtgttccaatctccttctccaatatggaagtttctgcacgcagttgaacagggcacttacagggattgca
gtcgagcaagacaagaacacccaagaagtattcgcacaagtaaaacagatctacaagacacccccaatcaaagattttggtggcttca
acttctcccaaatacttccagatccgtcaaagccatccaaacgctcattcatcgaagaccttctgttcaataaggtcacattggcggatgc
tggatttatcaagcaatatggggattgtttgggagatattgcagcgcgggacctgatatgcgcgcaaaagttcaatgggttgacggtgct
gccccctctcctcactgacgagatgatagctcagtatacgagcgctctcctcgcgggcactatcacctcaggttggaccttcggggctg
gcgcggcacttcaaataccatttgctatgcaaatggcctatcgttttaatggcatcggggtgacccaaaacgtgctctatgaaaaccaga
aactgatagctaatcaattcaatagtgccatcggcaaaatccaggattcattgtccagcaccgcctcagctctcgggaaattgcaagac
gtcgtcaaccaaaatgctcaagcgctcaacaccctcgttaaacaactctcaagtaatttcggcgcgattagtagcgtgctgaacgatatc
ttgagtcgtcttgatccacctgaagcagaagtccaaatcgacaggcttattaccggacgtctgcaaagcctgcaaacctacgttacaca
acaacttataagggcagccgaaataagggcttctgcaaatctggctgccacgaagatgagcgagtgtgtcctcggacaaagcaaaag
agttgacttttgcggcaaagggtaccaccttatgagtttccctcagtctgcgccccatggagtagtgtttctccacgtgacttatgtaccgg
cacaagaaaagaactttaccacagccccagcaatatgtcacgatggaaaagcacactttccacgggaaggggttttcgtgtccaacgg
gacccattggtttgttactcaacgcaacttttatgaaccccaaatcataaccactgataatacatttgtctctgggaactgtgatgtcgtgat
cggaatagtcaacaacacagtgtatgatccgttgcaaccagagctggattccttcaaagaagaactcgacaagtattttaagaatcacac
atcaccggacgtggatcttggagacatatcaggcataaacgctagtgtggtgaatatccaaaaggagatcgacaggcttaacgaagtt
gcaaagaacctcaatgaatctcttatcgatttgcaagaattgggcaaatacgagcaaggctacattcctgaagcaccacgggacgggc
aagcttacgtgcggaaagatggcgaatgggtgctcttgagtacctttctgggttgataa (SEQ ID NO: 119)
gccaccauggacuggaccuggauacucuuucucguagcagcagccacacgagugcauucaauguuuguguuucuugucc
uguugccauuggugagcucccaaugugucaaucugaccacccggacacaauugcccccugcauauacaaauucauucacg
agaggaguauacuaucccgacaaaguuuuccgguccucaguccuucauuccacucaagaucuuuuccuuccauucuuuu
cuaacguaaccugguuccaugcaauucaugucagugggaccaacggcacgaaacgguuugauaauccaguucuuccauu
caaugacggaguauauuuugcaucaacugagaaaucuaauaucauuagaggguggauuuucggaacaacucuugacucc
aagacccaauccuugcucaucguuaacaaugcuacaaaugugguuauuaaggucugugaguuucaauucuguaacgacc
ccuuucucggcguauacuaccauaagaauaauaagucuuggauggagucugaauuucgugucuacucaucagcgaacaa
uuguacauuugaauaugugucccaaccauuccugauggaucucgaaggaaagcagggcaauuuuaagaaccuucgggag
uucgucuuuaagaauaucgauggauacuuuaaaauauauaguaaacacacaccaaucaaucugguccgagaucuccccca
ggguuuuagugcucuggagccgcugguggauuugcccaucgguaucaauauuacgcgcuuccaaacauugcucgcccug
caucggaguuaccuuacgccuggcgacaguagcagcggauggaccgcuggagccgccgccuacuaugucggguaccuuc
aaccacgcacuuuucuccugaaauacaacgaaaaugggacaauuacagacgcuguugauugcgcacucgauccccuguca
gaaacaaaauguacacuuaaaucuuuuacggucgagaaagggauuuaccagacaucuaacuuccgaguacaaccaaccga
aucuauagugcgguuccccaacauuacgaaccugugcccguucggcgaaguguucaacgcaacacgauuugcuucuguu
uacgcuuggaaccggaaacgcaucuccaauugcgucgccgauuacagcguucuuuauaauucugcaucuuucuccaccu
ucaaaugcuauggugucucucccacaaaacucaaugaccucuguuuuaccaauguguaugcggacuccuucgucauacg
cggcgacgaggugagacaaaucgcaccagggcagacuggcaagaucgcugauuauaauuacaaacugccugaugauuuu
accggaugcguuauugcuuggaauucuaauaaccucgauuccaaaguuggcgggaacuacaauuaccucuaccgauugu
uucgcaaaucuaaccuuaagccguuugagagagauaucagcacagagauuuaucaagcuggcucuaccccuugcaaugga
guagaaggcuuuaacugcuauuuuccucuucagucuuauggauuucaaccuaccaacgggguaggguaccaacccuaua
gagucgucgugcucucauuugaacuccuucacgcccccgcuaccgugugugggccuaagaaauccacuaaucucguuaa
gaauaagugugugaauuuuaauuucaauggccugacagggaccgggguucugacugaaucuaacaagaaauuucugccg
uuccaacaauucgggcgcgauauugcagacacgaccgacgcggugcgcgauccucaaacacucgaaauccuugauaucac
uccuuguucuuucggcgguguaagcgucauuacuccuggcaccaauaccucuaaccaaguggcaguacucuaucaagau
gugaacugcacugaggucccgguugcaauacaugcggaucaacucaccccaacauggcgaguguauuccacagggagcaa
uguguuucaaacgagggccggcugucucauuggggccgaacacguuaauaauaguuaugagugcgauauucccauugga
gcgggcauuugugccagcuaucagacccaaacuaacucccccggguccgccucaucagucgcuagccaaucuauuauugc
guacacaaugucccugggagcugaaaacagcguggccuacucaaauaacagcauugcaauacccacaaauuuuacgauuu
caguaaccacugaaauccugcccgucuccaugaccaaaaccucugucgacugcacuauguacauaugcggcgacuccacc
gaguguuccaaucuccuucuccaauauggaaguuucugcacgcaguugaacagggcacuuacagggauugcagucgagc
aagacaagaacacccaagaaguauucgcacaaguaaaacagaucuacaagacacccccaaucaaagauuuugguggcuuca
acuucucccaaauacuuccagauccgucaaagccauccaaacgcucauucaucgaagaccuucuguucaauaaggucaca
uuggcggaugcuggauuuaucaagcaauauggggauuguuugggagauauugcagcgcgggaccugauaugcgcgcaa
aaguucaauggguugacggugcugcccccucuccucacugacgagaugauagcucaguauacgagcgcucuccucgcgg
gcacuaucaccucagguuggaccuucggggcuggcgcggcacuucaaauaccauuugcuaugcaaauggccuaucguuu
uaauggcaucggggugacccaaaacgugcucuaugaaaaccagaaacugauagcuaaucaauucaauagugccaucggca
aaauccaggauucauuguccagcaccgccucagcucucgggaaauugcaagacgucgucaaccaaaaugcucaagcgcuc
aacacccucguuaaacaacucucaaguaauuucggcgcgauuaguagcgugcugaacgauaucuugagucgucuugauc
caccugaagcagaaguccaaaucgacaggcuuauuaccggacgucugcaaagccugcaaaccuacguuacacaacaacuua
uaagggcagccgaaauaagggcuucugcaaaucuggcugccacgaagaugagcgaguguguccucggacaaagcaaaaga
guugacuuuugcggcaaaggguaccaccuuaugaguuucccucagucugcgccccauggaguaguguuucuccacguga
cuuauguaccggcacaagaaaagaacuuuaccacagccccagcaauaugucacgauggaaaagcacacuuuccacgggaa
gggguuuucguguccaacgggacccauugguuuguuacucaacgcaacuuuuaugaaccccaaaucauaaccacugaua
auacauuugucucugggaacugugaugucgugaucggaauagucaacaacacaguguaugauccguugcaaccagagcu
ggauuccuucaaagaagaacucgacaaguauuuuaagaaucacacaucaccggacguggaucuuggagacauaucaggca
uaaacgcuaguguggugaauauccaaaaggagaucgacaggcuuaacgaaguugcaaagaaccucaaugaaucucuuauc
gauuugcaagaauugggcaaauacgagcaaggcuacauuccugaagcaccacgggacgggcaagcuuacgugcggaaaga
uggcgaaugggugcucuugaguaccuuucuggguugauaa (SEQ ID NO: 120)
MDWTWILFLVAAATRVHSMFVFLVLLPLVSSQCVNLTTRTQLPPAYTNSFTRGVYY
PDKVFRSSVLHSTQDLFLPFFSNVTWFHAIHVSGTNGTKRFDNPVLPFNDGVYFASTE
KSNIIRGWIFGTTLDSKTQSLLIVNNATNVVIKVCEFQFCNDPFLGVYYHKNNKSWM
ESEFRVYSSANNCTFEYVSQPFLMDLEGKQGNFKNLREFVFKNIDGYFKIYSKHTPIN
LVRDLPQGFSALEPLVDLPIGINITRFQTLLALHRSYLTPGDSSSGWTAGAAAYYVGY
LQPRTFLLKYNENGTITDAVDCALDPLSETKCTLKSFTVEKGIYQTSNFRVQPTESIVR
FPNITNLCPFGEVFNATRFASVYAWNRKRISNCVADYSVLYNSASFSTFKCYGVSPTK
LNDLCFTNVYADSFVIRGDEVRQIAPGQTGKIADYNYKLPDDFTGCVIAWNSNNLDS
KVGGNYNYLYRLFRKSNLKPFERDISTEIYQAGSTPCNGVEGFNCYFPLQSYGFQPTN
GVGYQPYRVVVLSFELLHAPATVCGPKKSTNLVKNKCVNFNFNGLTGTGVLTESNK
KFLPFQQFGRDIADTTDAVRDPQTLEILDITPCSFGGVSVITPGTNTSNQVAVLYQDV
NCTEVPVAIHADQLTPTWRVYSTGSNVFQTRAGCLIGAEHVNNSYECDIPIGAGICAS
YQTQTNSP [symbol] A [symbol] SVASQSIIAYTMSLGAENSVAYSNNSIAIPTNFTISVTTEILPVSMTK
TSVDCTMYICGDSTECSNLLLQYGSFCTQLNRALTGIAVEQDKNTQEVFAQVKQIYK
TPPIKDFGGFNFSQILPDPSKPSKRSFIEDLLFNKVTLADAGFIKQYGDCLGDIAARDLI
CAQKFNGLTVLPPLLTDEMIAQYTSALLAGTITSGWTFGAGAALQIPFAMQMAYRFN
GIGVTQNVLYENQKLIANQFNSAIGKIQDSLSSTASALGKLQDVVNQNAQALNTLVK
QLSSNFGAISSVLNDILSRLDPPEAEVQIDRLITGRLQSLQTYVTQQLIRAAEIRASANL
AATKMSECVLGQSKRVDFCGKGYHLMSFPQSAPHGVVFLHVTYVPAQEKNFTTAPA
ICHDGKAHFPREGVFVSNGTHWFVTQRNFYEPQIITTDNTFVSGNCDVVIGIVNNTVY
DPLQPELDSFKEELDKYFKNHTSPDVDLGDISGINASVVNIQKEIDRLNEVAKNLNES
LIDLQELGKYEQGYIPEAPRDGQAYVRKDGEWVLLSTFLG** (SEQ ID NO: 121)
WuDivS_3F_D2P_Gly_pVax
ggatccgccaccatggattggacatggatattgttcttggttgcagcagctacccgggtacattccatgttcgtcttcctcgtactgctccc
acttgtcagtagtcaatgtgtgaacttgactacccggacgcagttgcccccggcctacactaatagcataacgcgtggagtctattaccc
cgacaaggtgttcaggtcatccgtcctgtatagcactcaagatctcttcttgcccttctttagtaacgtcacttggttccatgcaatccacgt
aagtggcactaatggcaccaagcgattcgacaatcccgtactcccttttaacgatggggtgtatttcgcgagcacagagaagtccaaca
tcatccgtggttggatcttcggcaccacactggattctaaaacccaaagcctgcttatagtaaataatgcaacaaacgtggtcattaaagt
ttgcgaatttcagttttgtaacgaccccttccttggcgtatattaccacaagaacaataaatcctggatggagagcgaatttagggtttaca
gttcagccaataattgtacattcgaatacgtaagccaacccttcttgatggacctggaaggaaagcaaggaaatttcaagaatctccgtg
aattcgtgttcaagaacatagacggctattttaaaatatattcaaaacacacaccgattaacctggtacgagatcttccgcaaggattctct
gcactggaaccgctggtcgatcttcctatcggcattaatatcactcggtttcaaacattgcttgctttgcatcggcgatatcttacacccgg
ggatagctcaagtggatggactgccggggctgctgcctattacgtaggctatctccaaccacggacattcctgctgaaatataacgaga
atgggacaatcacagatgctgttgactgcgctttggaccctttgagcgaaacaaagtgcacactcaaatccttcaccgtggaaaaggga
atctaccaaacgtctaattttcgcgtccaaccaaccgagagcatcgtcagattcccaaacattactaatctttgcccctttggcgaagtctt
caatgctacgcgatttgcgtccgtctacgcgtggaatcggaagcgcattagcaattgcgtcgcagactattcctttctctataactctgcat
ccttttctacctttaaatgttatggagtcaacgggacaaagctcaatgacctttgctttacaaatgtctatgcagactcttttgtcatccgtggt
gatgaggtacgacagatcgcgccaggacaaaccgggaagatcgccgattacaactacaaactgcccgacgatttcaccgggtgcgt
tattgcttggaactccaataatcttgatagtaaagttggcggcaactacaactacctgtatcgacttttccgtaaaagtaatctcaagccattt
gaaagagacatcaacacaacaatttatcaggctggatctaccccatgcaacggcgttgaaggatttaactgctacttccctctccaaagt
tacggtttccaaccaacaaacggcgttggctatcaaccttatagagtcgttgtcctctcttttgagcttaaccatgccccagcgacagtgtg
tgggccgaagaaaagcactaatttggttaagaataaatgtgttaactttaattttaatggattgacggggacaggggttctgacagagtct
aacaagaaatttctgccgttccaacagtttgggcgagatattgcagataccacggacgccgttcgagacccccaaacacttgaaattct
cgatataactccctgcagctttggcggtgtatccgttatcacgcccgggacaaataccagtaaccaagtcgcagtcctgtatcaaggcg
taaattgtacggaagtgcccgttgctatacacgctgaccaactgactcccacatggagagtctatagtactggttctaatgtgttccaaac
acgagccggttgcctgatcggagccgaacatgttaacaactcatacgaatgtgacataccgattggcgccggcatttgcgccagctat
caaacgcagaccaactcaccaagaaggcgtcgcagtgtagcaagtcaatctattatagcgtataccatgtctttgggagcagaaaactc
cgttgcttactctaataattctattgctatcccaaccaattttacaatctcagttactaccgaaatactgccggtaagcatgactaagacatcc
gtggattgcactatgtacatctgtggggactcaacagagtgtagtaatttgctgcttcaatatggctccttctgcactcaactgaatcgtgct
ctcacgggaattgctgttgagcaagataagaatacccaggaagtgtttgcccaagtcaaacaaatttataagacaccaccaattaaagat
tttggtggatttaatttcagccaaatacttccagatccctcacgcagacgacggtctttcatcgaggaccttctgttcaacaaagttactctg
gctgatgcaggcttcattaagcagtacggtgattgtcttggagacatcgctgcgcgcgacctcatatgcgcccagaaatttaatgggctg
accgtacttccccctttgctgactgatgagatgattgcacaatacacttccgcactccttgcgggtactatcacatccgggtggacttttgg
agctggcgccgctcttcaaattcccttcgccatgcaaatggcgtacaggtttaatggcatcggtgtgacacagaatgtgctctatgagaa
ccagaaacttatcgcaaaccagttcaattcagccatcgggaaaatccaagatagtctcagtagtactgcctcagctctcggcaagctcc
aggatgtagtgaatcagaatgcacaagccttgaacactctcgttaaacaactttcttccaactttggtgccatcagcagtgggcctaacg
atatattgagccgcttgcccaaagtggaagcggaagtccaaatagatagacttattaccggccggctgcaatctctgcaaacctatgtg
actcaacaattgatccgagctgccgaaatccgtgccagtgcaaatctcgccgcgaccaagatgagcgaatgtgtcttgggacagagc
aaaagagtcgatttctgcggaaaaggctaccacctgatgtctttccctcaatctgccccgcacggagtggtctttctccatgtgacttatgt
gccagcccaagaaaagaactttacaaccgcaccggcaatttgccatgacggaaaggcgcatttcccccgtgagggagtctttgtgag
caacgggacccattggttcgtgacacaacgcaatttctatgagcctcagatcattaccacggacaatactttcgtgtctggcaactgtga
cgtgctgataggcatcgtgaataataccgtctacgatcccttgcaacttgaactggactcattcaaagaagagctggataagtattttaag
aaccatacaagccctgatgtcgatcttggggatatatcaggcataaacgcatctgttgtgaatatccaaaaggaaattgatagattgaac
gaagttgccaagaacctcaatgaaagtcttatcgacctgcaagaactgggaaaatatgagcaatatataaaatggccatggagcgggc
gccggagacggagaaggggtagcggcggtagtggtagcgggtacatcccagaggcacccagagatggacaagcttacgtaagga
aggacggggaatgggtgctgctcagtacatttcttggatgataa (SEQ ID NO: 122)
ggauccgccaccauggauuggacauggauauuguucuugguugcagcagcuacccggguacauuccauguucgucuucc
ucguacugcucccacuugucaguagucaaugugugaacuugacuacccggacgcaguugcccccggccuacacuaauagc
auaacgcguggagucuauuaccccgacaagguguucaggucauccguccuguauagcacucaagaucucuucuugcccu
ucuuuaguaacgucacuugguuccaugcaauccacguaaguggcacuaauggcaccaagcgauucgacaaucccguacuc
ccuuuuaacgaugggguguauuucgcgagcacagagaaguccaacaucauccgugguuggaucuucggcaccacacugg
auucuaaaacccaaagccugcuuauaguaaauaaugcaacaaacguggucauuaaaguuugcgaauuucaguuuuguaac
gaccccuuccuuggcguauauuaccacaagaacaauaaauccuggauggagagcgaauuuaggguuuacaguucagccaa
uaauuguacauucgaauacguaagccaacccuucuugauggaccuggaaggaaagcaaggaaauuucaagaaucuccgug
aauucguguucaagaacauagacggcuauuuuaaaauauauucaaaacacacaccgauuaaccugguacgagaucuuccg
caaggauucucugcacuggaaccgcuggucgaucuuccuaucggcauuaauaucacucgguuucaaacauugcuugcuu
ugcaucggcgauaucuuacacccggggauagcucaaguggauggacugccggggcugcugccuauuacguaggcuaucu
ccaaccacggacauuccugcugaaauauaacgagaaugggacaaucacagaugcuguugacugcgcuuuggacccuuuga
gcgaaacaaagugcacacucaaauccuucaccguggaaaagggaaucuaccaaacgucuaauuuucgcguccaaccaaccg
agagcaucgucagauucccaaacauuacuaaucuuugccccuuuggcgaagucuucaaugcuacgcgauuugcguccgu
cuacgcguggaaucggaagcgcauuagcaauugcgucgcagacuauuccuuucucuauaacucugcauccuuuucuacc
uuuaaauguuauggagucaacgggacaaagcucaaugaccuuugcuuuacaaaugucuaugcagacucuuuugucaucc
guggugaugagguacgacagaucgcgccaggacaaaccgggaagaucgccgauuacaacuacaaacugcccgacgauuuc
accgggugcguuauugcuuggaacuccaauaaucuugauaguaaaguuggcggcaacuacaacuaccuguaucgacuuu
uccguaaaaguaaucucaagccauuugaaagagacaucaacacaacaauuuaucaggcuggaucuaccccaugcaacggc
guugaaggauuuaacugcuacuucccucuccaaaguuacgguuuccaaccaacaaacggcguuggcuaucaaccuuauag
agucguuguccucucuuuugagcuuaaccaugccccagcgacagugugugggccgaagaaaagcacuaauuugguuaag
aauaaauguguuaacuuuaauuuuaauggauugacggggacagggguucugacagagucuaacaagaaauuucugccgu
uccaacaguuugggcgagauauugcagauaccacggacgccguucgagacccccaaacacuugaaauucucgauauaacu
cccugcagcuuuggcgguguauccguuaucacgcccgggacaaauaccaguaaccaagucgcaguccuguaucaaggcg
uaaauuguacggaagugcccguugcuauacacgcugaccaacugacucccacauggagagucuauaguacugguucuaa
uguguuccaaacacgagccgguugccugaucggagccgaacauguuaacaacucauacgaaugugacauaccgauuggc
gccggcauuugcgccagcuaucaaacgcagaccaacucaccaagaaggcgucgcaguguagcaagucaaucuauuauagc
guauaccaugucuuugggagcagaaaacuccguugcuuacucuaauaauucuauugcuaucccaaccaauuuuacaauc
ucaguuacuaccgaaauacugccgguaagcaugacuaagacauccguggauugcacuauguacaucuguggggacucaa
cagaguguaguaauuugcugcuucaauauggcuccuucugcacucaacugaaucgugcucucacgggaauugcuguuga
gcaagauaagaauacccaggaaguguuugcccaagucaaacaaauuuauaagacaccaccaauuaaagauuuugguggau
uuaauuucagccaaauacuuccagaucccucacgcagacgacggucuuucaucgaggaccuucuguucaacaaaguuacu
cuggcugaugcaggcuucauuaagcaguacggugauugucuuggagacaucgcugcgcgcgaccucauaugcgcccaga
aauuuaaugggcugaccguacuucccccuuugcugacugaugagaugauugcacaauacacuuccgcacuccuugcggg
uacuaucacauccggguggacuuuuggagcuggcgccgcucuucaaauucccuucgccaugcaaauggcguacagguuu
aauggcaucggugugacacagaaugugcucuaugagaaccagaaacuuaucgcaaaccaguucaauucagccaucgggaa
aauccaagauagucucaguaguacugccucagcucucggcaagcuccaggauguagugaaucagaaugcacaagccuuga
acacucucguuaaacaacuuucuuccaacuuuggugccaucagcagugggccuaacgauauauugagccgcuugcccaaa
guggaagcggaaguccaaauagauagacuuauuaccggccggcugcaaucucugcaaaccuaugugacucaacaauugau
ccgagcugccgaaauccgugccagugcaaaucucgccgcgaccaagaugagcgaaugugucuugggacagagcaaaagag
ucgauuucugcggaaaaggcuaccaccugaugucuuucccucaaucugccccgcacggaguggucuuucuccaugugac
uuaugugccagcccaagaaaagaacuuuacaaccgcaccggcaauuugccaugacggaaaggcgcauuucccccgugagg
gagucuuugugagcaacgggacccauugguucgugacacaacgcaauuucuaugagccucagaucauuaccacggacaa
uacuuucgugucuggcaacugugacgugcugauaggcaucgugaauaauaccgucuacgaucccuugcaacuugaacug
gacucauucaaagaagagcuggauaaguauuuuaagaaccauacaagcccugaugucgaucuuggggauauaucaggca
uaaacgcaucuguugugaauauccaaaaggaaauugauagauugaacgaaguugccaagaaccucaaugaaagucuuauc
gaccugcaagaacugggaaaauaugagcaauauauaaaauggccauggagcgggcgccggagacggagaagggguagcg
gcgguagugguagcggguacaucccagaggcacccagagauggacaagcuuacguaaggaaggacggggaaugggugcu
gcucaguacauuucuuggaugauaa (SEQ ID NO: 123)
MDWTWILFLVAAATRVHSMFVFLVLLPLVSSQCVNLTTRTQLPPAYTNSFTRGVYY
PDKVFRSSVLHSTQDLFLPFFSNVTWFHAIHVSGTNGTKRFDNPVLPFNDGVYFASTE
KSNIIRGWIFGTTLDSKTQSLLIVNNATNVVIKVCEFQFCNDPFLGVYYHKNNKSWM
ESEFRVYSSANNCTFEYVSQPFLMDLEGKQGNFKNLREFVFKNIDGYFKIYSKHTPIN
LVRDLPQGFSALEPLVDLPIGINITRFQTLLALHRSYLTPGDSSSGWTAGAAAYYVGY
LQPRTFLLKYNENGTITDAVDCALDPLSETKCTLKSFTVEKGIYQTSNFRVQPTESIVR
FPNITNLCPFGEVFNATRFASVYAWNRKRISNCVADYSVLYNSASFSTFKCYGV [symbol] T
KLNDLCFTNVYADSFVIRGDEVRQIAPGQTGKIADYNYKLPDDFTGCVIAWNSNNLD
SKVGGNYNYLYRLFRKSNLKPFERDI [symbol] T [symbol] IYQAGSTPCNGVEGFNCYFPLQSYGFQPT
NGVGYQPYRVVVLSFEL [symbol] HAPATVCGPKKSTNLVKNKCVNFNFNGLTGTGVLTESN
KKFLPFQQFGRDIADTTDAVRDPQTLEILDITPCSFGGVSVITPGTNTSNQVAVLYQD
VNCTEVPVAIHADQLTPTWRVYSTGSNVFQTRAGCLIGAEHVNNSYECDIPIGAGICA
SYQTQTNSPRRRRSVASQSIIAYTMSLGAENSVAYSNNSIAIPTNFTISVTTEILPVSMT
KTSVDCTMYICGDSTECSNLLLQYGSFCTQLNRALTGIAVEQDKNTQEVFAQVKQIY
KTPPIKDFGGFNFSQILPDPS [symbol] RSFIEDLLFNKVTLADAGFIKQYGDCLGDIAARDLI
CAQKFNGLTVLPPLLTDEMIAQYTSALLAGTITSGWTFGAGAALQIPFAMQMAYRFN
GIGVTQNVLYENQKLIANQFNSAIGKIQDSLSSTASALGKLQDVVNQNAQALNTLVK
QLSSNFGAISS [symbol] NDILSRL [symbol] KVEAEVQIDRLITGRLQSLQTYVTQQLIRAAEIRASANL
AATKMSECVLGQSKRVDFCGKGYHLMSFPQSAPHGVVFLHVTYVPAQEKNFTTAPA
ICHDGKAHFPREGVFVSNGTHWFVTQRNFYEPQIITTDNTFVSGNCDVVIGIVNNTVY
DPLQPELDSFKEELDKYFKNHTSPDVDLGDISGINASVVNIQKEIDRLNEVAKNLNES
LIDLQELGKYEQYIKWPWSGRRRRRRGSGGSGSGYIPEAPRDGQAYVRKDGEWVLL
STFLG** (SEQ ID NO: 124)
WuS_3F_2P_NoTri_pVax
ggatccgccaccatggactggacgtggattttgtttcttgtcgctgcagctacccgggttcactccatgtttgttttcctggtgctccttccc
cttgtaagctcacaatgcgtcaatttgaccacgcgtacacaactgcccccagcatatactaattctttcacacgcggggtctactatcccg
ataaagtctttagaagtagcgtacttcatagtacccaagatttgtttctgcccttcttcagcaatgtcacgtggtttcatgcgatccatgtatc
cggcacgaacgggacaaaacgatttgataaccccgtgctccccttcaacgacggggtttatttcgccagcaccgagaaatcaaatatta
tcaggggctggattttcgggacaacacttgattccaagacacaatctcttcttatcgtgaataatgcaactaatgtggtgatcaaggtttgc
gagttccaattttgtaatgacccttttcttggcgtgtactatcataagaataacaagagttggatggaatcagagttccgggtctacagcag
tgctaacaattgtacgtttgaatacgtttctcagccttttctgatggaccttgaaggtaagcaaggcaatttcaagaacttgcgggaatttgt
cttcaagaacatagatggctattttaagatatatagcaaacacactcccataaatctcgtcagagatcttccacagggctttagcgccctg
gaaccattggttgatttgccaattggaataaacataactcgattccaaaccttgctcgcactccatcggagctacctgacgcctggagatt
cctcttccggctggactgccggagcagcagcttattatgtaggctacttgcaaccccgcacgttcctgctcaaatataatgaaaatggca
ctataaccgatgcggtagactgcgctcttgatcccctgagtgaaactaaatgtacgttgaaaagctttactgtagagaaaggcatctatca
gactagtaactttagggtgcaacccacggagtccattgtacggttcccaaacattaccaacctctgtccattcggagaagtgtttaatgcc
acaagattcgcttcagtgtatgcctggaaccggaaacgcatctcaaattgcgttgccgattattcagtactttacaactcagccagtttctct
acttttaagtgctatggcgtttccccgacgaagctcaatgatctgtgctttactaacgtttacgcagactctttcgtcatcagaggcgatgaa
gtcaggcaaatagctcctggtcaaaccggcaagatcgccgactacaactataaactgcccgatgatttcactgggtgtgtgatcgcgtg
gaattccaataatttggactctaaggtaggtggcaactataactacctctatcgactcttccgaaaatccaaccttaagccgtttgaacgcg
atattagtaccgaaatataccaagccgggtctacaccctgtaacggcgttgaaggtttcaattgttactttccactgcagagttatggctttc
aacccaccaacggggttggctatcagccctatagggttgtggtcctcagttttgagcttctgcatgcaccagcaaccgtgtgcggacct
aagaagtcaacaaatctcgtgaagaacaagtgtgttaatttcaatttcaatggccttacagggaccggagtgcttacagaaagcaataag
aagttcttgccctttcaacagttcggcagggacatagcggacacgacagatgcagttcgagacccgcaaactctcgaaattctggatat
cacaccttgcagttttggtggcgtgtctgttatcacaccaggcaccaacacttccaaccaggtggcagttttgtaccaggatgttaattgta
cagaggtcccagtggcaatacacgctgaccaactgactccaacttggagagtctactctacaggctcaaacgtcttccaaacacgggc
ggggtgtctgatcggagcagaacacgttaataacagttacgagtgtgatatcccgataggagctggtatttgcgcttcataccagacgc
aaacgaactcaccacgaagacgccggtcagttgcatcacaatccattattgcatacaccatgtcactcggagcggagaattctgtagca
tacagtaacaatagtatcgcaatacctacgaactttaccatttccgtcacaactgaaatcttgcccgtctcaatgacaaagacaagcgtag
attgtacaatgtatatttgcggagattcaacagagtgctccaacctgctgctccagtacggtagtttctgtacccagctcaatagggccct
caccggaattgcagttgaacaagacaagaacacccaagaagtgtttgcacaagtcaaacaaatctataaaacacccccaatcaaagat
ttcggtggcttcaacttttcacaaattctccctgatcctagccgccgccgcagatcattcatcgaagacttgctcttcaataaggttaccctg
gcagacgccggttttattaaacaatacggagattgcctcggtgacatcgccgctagagaccttatctgtgcccaaaagttcaacggact
caccgtgctgcccccattgctgaccgatgaaatgattgctcaatatacatctgcgctcctcgcagggaccattacttcagggtggactttt
ggggctggcgccgcattgcagattcccttcgccatgcagatggcatataggtttaacggcattggagttacccaaaatgtactctacga
gaaccaaaagctgattgcaaatcagttcaacagtgcaataggcaaaatacaagactctctgtcttcaaccgccagcgctcttggaaagc
tccaagatgttgttaatcaaaatgcccaagcgttgaataccctcgtgaagcaactctccagcaattttggtgccatctctagcgtgctgaa
cgacattctgtcacggctcgatcccccggaagccgaggtacaaattgaccgattgataaccgggcgactccaaagccttcagacctac
gttacacaacagctcattcgcgctgcagaaattagagcctctgcaaatcttgcagctacaaagatgtcagagtgcgttctcggtcaaagc
aaaagagtggatttctgcggaaaggggtaccacctcatgagtttcccacagagtgcccctcatggcgtagtctttcttcatgttacttatgt
accagcccaagaaaagaatttcactacagcacccgcgatttgtcatgatggcaaagcgcacttccctcgggaaggcgtgttcgtgtcta
atggaacacattggttcgtgacgcaacggaatttctacgagccccaaattatcactactgataacaccttcgtctccggaaactgcgatgt
tgttattggcattgtcaacaataccgtttacgacccgctccaacctgagctggattcatttaaagaggaattggacaaatattttaagaatca
tacctctccagacgtggatttgggtgacattagcggaataaatgcatctgtggtcaatatccaaaaggaaattgataggctgaacgaggt
cgccaagaatttgaacgaatctttgattgatcttcaagaacttggcaagtatgaacaatacataaaatggccctggtgatag (SEQ ID
NO: 125)
ggauccgccaccauggacuggacguggauuuuguuucuugucgcugcagcuacccggguucacuccauguuuguuuuc
cuggugcuccuuccccuuguaagcucacaaugcgucaauuugaccacgcguacacaacugcccccagcauauacuaauuc
uuucacacgcggggucuacuaucccgauaaagucuuuagaaguagcguacuucauaguacccaagauuuguuucugccc
uucuucagcaaugucacgugguuucaugcgauccauguauccggcacgaacgggacaaaacgauuugauaaccccgugc
uccccuucaacgacgggguuuauuucgccagcaccgagaaaucaaauauuaucaggggcuggauuuucgggacaacacu
ugauuccaagacacaaucucuucuuaucgugaauaaugcaacuaauguggugaucaagguuugcgaguuccaauuuugu
aaugacccuuuucuuggcguguacuaucauaagaauaacaagaguuggauggaaucagaguuccgggucuacagcagug
cuaacaauuguacguuugaauacguuucucagccuuuucugauggaccuugaagguaagcaaggcaauuucaagaacuu
gcgggaauuugucuucaagaacauagauggcuauuuuaagauauauagcaaacacacucccauaaaucucgucagagauc
uuccacagggcuuuagcgcccuggaaccauugguugauuugccaauuggaauaaacauaacucgauuccaaaccuugcu
cgcacuccaucggagcuaccugacgccuggagauuccucuuccggcuggacugccggagcagcagcuuauuauguaggc
uacuugcaaccccgcacguuccugcucaaauauaaugaaaauggcacuauaaccgaugcgguagacugcgcucuugaucc
ccugagugaaacuaaauguacguugaaaagcuuuacuguagagaaaggcaucuaucagacuaguaacuuuagggugcaa
cccacggaguccauuguacgguucccaaacauuaccaaccucuguccauucggagaaguguuuaaugccacaagauucgc
uucaguguaugccuggaaccggaaacgcaucucaaauugcguugccgauuauucaguacuuuacaacucagccaguuuc
ucuacuuuuaagugcuauggcguuuccccgacgaagcucaaugaucugugcuuuacuaacguuuacgcagacucuuucg
ucaucagaggcgaugaagucaggcaaauagcuccuggucaaaccggcaagaucgccgacuacaacuauaaacugcccgau
gauuucacugggugugugaucgcguggaauuccaauaauuuggacucuaagguagguggcaacuauaacuaccucuauc
gacucuuccgaaaauccaaccuuaagccguuugaacgcgauauuaguaccgaaauauaccaagccgggucuacacccugu
aacggcguugaagguuucaauuguuacuuuccacugcagaguuauggcuuucaacccaccaacgggguuggcuaucagc
ccuauaggguugugguccucaguuuugagcuucugcaugcaccagcaaccgugugcggaccuaagaagucaacaaaucu
cgugaagaacaaguguguuaauuucaauuucaauggccuuacagggaccggagugcuuacagaaagcaauaagaaguuc
uugcccuuucaacaguucggcagggacauagcggacacgacagaugcaguucgagacccgcaaacucucgaaauucugga
uaucacaccuugcaguuuugguggcgugucuguuaucacaccaggcaccaacacuuccaaccagguggcaguuuuguac
caggauguuaauuguacagaggucccaguggcaauacacgcugaccaacugacuccaacuuggagagucuacucuacagg
cucaaacgucuuccaaacacgggcggggugucugaucggagcagaacacguuaauaacaguuacgagugugauaucccg
auaggagcugguauuugcgcuucauaccagacgcaaacgaacucaccacgaagacgccggucaguugcaucacaauccau
uauugcauacaccaugucacucggagcggagaauucuguagcauacaguaacaauaguaucgcaauaccuacgaacuuua
ccauuuccgucacaacugaaaucuugcccgucucaaugacaaagacaagcguagauuguacaauguauauuugcggagau
ucaacagagugcuccaaccugcugcuccaguacgguaguuucuguacccagcucaauagggcccucaccggaauugcagu
ugaacaagacaagaacacccaagaaguguuugcacaagucaaacaaaucuauaaaacacccccaaucaaagauuucggugg
cuucaacuuuucacaaauucucccugauccuagccgccgccgcagaucauucaucgaagacuugcucuucaauaagguua
cccuggcagacgccgguuuuauuaaacaauacggagauugccucggugacaucgccgcuagagaccuuaucugugccca
aaaguucaacggacucaccgugcugcccccauugcugaccgaugaaaugauugcucaauauacaucugcgcuccucgcag
ggaccauuacuucaggguggacuuuuggggcuggcgccgcauugcagauucccuucgccaugcagauggcauauaggu
uuaacggcauuggaguuacccaaaauguacucuacgagaaccaaaagcugauugcaaaucaguucaacagugcaauaggc
aaaauacaagacucucugucuucaaccgccagcgcucuuggaaagcuccaagauguuguuaaucaaaaugcccaagcguu
gaauacccucgugaagcaacucuccagcaauuuuggugccaucucuagcgugcugaacgacauucugucacggcucgau
cccccggaagccgagguacaaauugaccgauugauaaccgggcgacuccaaagccuucagaccuacguuacacaacagcu
cauucgcgcugcagaaauuagagccucugcaaaucuugcagcuacaaagaugucagagugcguucucggucaaagcaaaa
gaguggauuucugcggaaagggguaccaccucaugaguuucccacagagugccccucauggcguagucuuucuucaugu
uacuuauguaccagcccaagaaaagaauuucacuacagcacccgcgauuugucaugauggcaaagcgcacuucccucggg
aaggcguguucgugucuaauggaacacauugguucgugacgcaacggaauuucuacgagccccaaauuaucacuacuga
uaacaccuucgucuccggaaacugcgauguuguuauuggcauugucaacaauaccguuuacgacccgcuccaaccugagc
uggauucauuuaaagaggaauuggacaaauauuuuaagaaucauaccucuccagacguggauuugggugacauuagcgg
aauaaaugcaucuguggucaauauccaaaaggaaauugauaggcugaacgaggucgccaagaauuugaacgaaucuuug
auugaucuucaagaacuuggcaaguaugaacaauacauaaaauggcccuggugauag (SEQ ID NO: 126)
MDWTWILFLVAAATRVHSMFVFLVLLPLVSSQCVNLTTRTQLPPAYTNSFTRGVYY
PDKVFRSSVLHSTQDLFLPFFSNVTWFHAIHVSGTNGTKRFDNPVLPFNDGVYFASTE
KSNIIRGWIFGTTLDSKTQSLLIVNNATNVVIKVCEFQFCNDPFLGVYYHKNNKSWM
ESEFRVYSSANNCTFEYVSQPFLMDLEGKQGNFKNLREFVFKNIDGYFKIYSKHTPIN
LVRDLPQGFSALEPLVDLPIGINITRFQTLLALHRSYLTPGDSSSGWTAGAAAYYVGY
LQPRTFLLKYNENGTITDAVDCALDPLSETKCTLKSFTVEKGIYQTSNFRVQPTESIVR
FPNITNLCPFGEVFNATRFASVYAWNRKRISNCVADYSVLYNSASFSTFKCYGVSPTK
LNDLCFTNVYADSFVIRGDEVRQIAPGQTGKIADYNYKLPDDFTGCVIAWNSNNLDS
KVGGNYNYLYRLFRKSNLKPFERDISTEIYQAGSTPCNGVEGFNCYFPLQSYGFQPTN
GVGYQPYRVVVLSFELLHAPATVCGPKKSTNLVKNKCVNFNFNGLTGTGVLTESNK
KFLPFQQFGRDIADTTDAVRDPQTLEILDITPCSFGGVSVITPGTNTSNQVAVLYQDV
NCTEVPVAIHADQLTPTWRVYSTGSNVFQTRAGCLIGAEHVNNSYECDIPIGAGICAS
YQTQTNSPRR [symbol] RSVASQSIIAYTMSLGAENSVAYSNNSIAIPTNFTISVTTEILPVSMTK
TSVDCTMYICGDSTECSNLLLQYGSFCTQLNRALTGIAVEQDKNTQEVFAQVKQIYK
TPPIKDFGGFNFSQILPDPS [symbol] RSFIEDLLFNKVTLADAGFIKQYGDCLGDIAARDLIC
AQKFNGLTVLPPLLTDEMIAQYTSALLAGTITSGWTFGAGAALQIPFAMQMAYRFNG
IGVTQNVLYENQKLIANQFNSAIGKIQDSLSSTASALGKLQDVVNQNAQALNTLVKQ
LSSNFGAISSVLNDILSRLD [symbol] EAEVQIDRLITGRLQSLQTYVTQQLIRAAEIRASANLA
ATKMSECVLGQSKRVDFCGKGYHLMSFPQSAPHGVVFLHVTYVPAQEKNFTTAPAI
CHDGKAHFPREGVFVSNGTHWFVTQRNFYEPQIITTDNTFVSGNCDVVIGIVNNTVY
DPLQPELDSFKEELDKYFKNHTSPDVDLGDISGINASVVNIQKEIDRLNEVAKNLNES
LIDLQELGKYEQYIKWPW** (SEQ ID NO: 127)
WuS_3F_D2P_Gly_pVax
ggatccgccaccatggattggacatggatattgttcttggttgcagcagctacccgggtacattccatgttcgtcttcctcgtactgctccc
acttgtcagtagtcaatgtgtgaacttgactacccggacgcagttgcccccggcctacactaatagctttacgcgtggagtctattacccc
gacaaggtgttcaggtcatccgtcctgcatagcactcaagatctcttcttgcccttctttagtaacgtcacttggttccatgcaatccacgta
agtggcactaatggcaccaagcgattcgacaatcccgtactcccttttaacgatggggtgtatttcgcgagcacagagaagtccaacat
catccgtggttggatcttcggcaccacactggattctaaaacccaaagcctgcttatagtaaataatgcaacaaacgtggtcattaaagtt
tgcgaatttcagttttgtaacgaccccttccttggcgtatattaccacaagaacaataaatcctggatggagagcgaatttagggtttacag
ttcagccaataattgtacattcgaatacgtaagccaacccttcttgatggacctggaaggaaagcaaggaaatttcaagaatctccgtga
attcgtgttcaagaacatagacggctattttaaaatatattcaaaacacacaccgattaacctggtacgagatcttccgcaaggattctctg
cactggaaccgctggtcgatcttcctatcggcattaatatcactcggtttcaaacattgcttgctttgcatcggagttatcttacacccgggg
atagctcaagtggatggactgccggggctgctgcctattacgtaggctatctccaaccacggacattcctgctgaaatataacgagaat
gggacaatcacagatgctgttgactgcgctttggaccctttgagcgaaacaaagtgcacactcaaatccttcaccgtggaaaagggaat
ctaccaaacgtctaattttcgcgtccaaccaaccgagagcatcgtcagattcccaaacattactaatctttgcccctttggcgaagtcttca
atgctacgcgatttgcgtccgtctacgcgtggaatcggaagcgcattagcaattgcgtcgcagactattccgtgctctataactctgcatc
cttttctacctttaaatgttatggagtcaacgggacaaagctcaatgacctttgctttacaaatgtctatgcagactcttttgtcatccgtggtg
atgaggtacgacagatcgcgccaggacaaaccgggaagatcgccgattacaactacaaactgcccgacgatttcaccgggtgcgtta
ttgcttggaactccaataatcttgatagtaaagttggcggcaactacaactacctgtatcgacttttccgtaaaagtaatctcaagccatttg
aaagagacatcaacacaacaatttatcaggctggatctaccccatgcaacggcgttgaaggatttaactgctacttccctctccaaagtta
cggtttccaaccaacaaacggcgttggctatcaaccttatagagtcgttgtcctctcttttgagcttaaccatgccccagcgacagtgtgt
gggccgaagaaaagcactaatttggttaagaataaatgtgttaactttaattttaatggattgacggggacaggggttctgacagagtcta
acaagaaatttctgccgttccaacagtttgggcgagatattgcagataccacggacgccgttcgagacccccaaacacttgaaattctc
gatataactccctgcagctttggcggtgtatccgttatcacgcccgggacaaataccagtaaccaagtcgcagtcctgtatcaagacgta
aattgtacggaagtgcccgttgctatacacgctgaccaactgactcccacatggagagtctatagtactggttctaatgtgttccaaacac
gagccggttgcctgatcggagccgaacatgttaacaactcatacgaatgtgacataccgattggcgccggcatttgcgccagctatca
aacgcagaccaactcaccaagaaggcgtcgcagtgtagcaagtcaatctattatagcgtataccatgtctttgggagcagaaaactcc
gttgcttactctaataattctattgctatcccaaccaattttacaatctcagttactaccgaaatactgccggtaagcatgactaagacatccg
tggattgcactatgtacatctgtggggactcaacagagtgtagtaatttgctgcttcaatatggctccttctgcactcaactgaatcgtgctc
tcacgggaattgctgttgagcaagataagaatacccaggaagtgtttgcccaagtcaaacaaatttataagacaccaccaattaaagatt
ttggtggatttaatttcagccaaatacttccagatccctcacgcagacgacggtctttcatcgaggaccttctgttcaacaaagttactctg
gctgatgcaggcttcattaagcagtacggtgattgtcttggagacatcgctgcgcgcgacctcatatgcgcccagaaatttaatgggctg
accgtacttccccctttgctgactgatgagatgattgcacaatacacttccgcactccttgcgggtactatcacatccgggtggacttttgg
agctggcgccgctcttcaaattcccttcgccatgcaaatggcgtacaggtttaatggcatcggtgtgacacagaatgtgctctatgagaa
ccagaaacttatcgcaaaccagttcaattcagccatcgggaaaatccaagatagtctcagtagtactgcctcagctctcggcaagctcc
aggatgtagtgaatcagaatgcacaagccttgaacactctcgttaaacaactttcttccaactttggtgccatcagcagtgggcctaacg
atatattgagccgcttgcccaaagtggaagcggaagtccaaatagatagacttattaccggccggctgcaatctctgcaaacctatgtg
actcaacaattgatccgagctgccgaaatccgtgccagtgcaaatctcgccgcgaccaagatgagcgaatgtgtcttgggacagagc
aaaagagtcgatttctgcggaaaaggctaccacctgatgtctttccctcaatctgccccgcacggagtggtctttctccatgtgacttatgt
gccagcccaagaaaagaactttacaaccgcaccggcaatttgccatgacggaaaggcgcatttcccccgtgagggagtctttgtgag
caacgggacccattggttcgtgacacaacgcaatttctatgagcctcagatcattaccacggacaatactttcgtgtctggcaactgtga
cgtggtcataggcatcgtgaataataccgtctacgatcccttgcaacccgaactggactcattcaaagaagagctggataagtattttaa
gaaccatacaagccctgatgtcgatcttggggatatatcaggcataaacgcatctgttgtgaatatccaaaaggaaattgatagattgaa
cgaagttgccaagaacctcaatgaaagtcttatcgacctgcaagaactgggaaaatatgagcaatatataaaatggccatggagcggg
cgccggagacggagaaggggtagcggcggtagtggtagcgggtacatcccagaggcacccagagatggacaagcttacgtaagg
aaggacggggaatgggtgctgctcagtacatttcttggatgataa (SEQ ID NO: 128)
ggauccgccaccauggauuggacauggauauuguucuugguugcagcagcuacccggguacauuccauguucgucuucc
ucguacugcucccacuugucaguagucaaugugugaacuugacuacccggacgcaguugcccccggccuacacuaauagc
uuuacgcguggagucuauuaccccgacaagguguucaggucauccguccugcauagcacucaagaucucuucuugcccu
ucuuuaguaacgucacuugguuccaugcaauccacguaaguggcacuaauggcaccaagcgauucgacaaucccguacuc
ccuuuuaacgaugggguguauuucgcgagcacagagaaguccaacaucauccgugguuggaucuucggcaccacacugg
auucuaaaacccaaagccugcuuauaguaaauaaugcaacaaacguggucauuaaaguuugcgaauuucaguuuuguaac
gaccccuuccuuggcguauauuaccacaagaacaauaaauccuggauggagagcgaauuuaggguuuacaguucagccaa
uaauuguacauucgaauacguaagccaacccuucuugauggaccuggaaggaaagcaaggaaauuucaagaaucuccgug
aauucguguucaagaacauagacggcuauuuuaaaauauauucaaaacacacaccgauuaaccugguacgagaucuuccg
caaggauucucugcacuggaaccgcuggucgaucuuccuaucggcauuaauaucacucgguuucaaacauugcuugcuu
ugcaucggaguuaucuuacacccggggauagcucaaguggauggacugccggggcugcugccuauuacguaggcuaucu
ccaaccacggacauuccugcugaaauauaacgagaaugggacaaucacagaugcuguugacugcgcuuuggacccuuuga
gcgaaacaaagugcacacucaaauccuucaccguggaaaagggaaucuaccaaacgucuaauuuucgcguccaaccaaccg
agagcaucgucagauucccaaacauuacuaaucuuugccccuuuggcgaagucuucaaugcuacgcgauuugcguccgu
cuacgcguggaaucggaagcgcauuagcaauugcgucgcagacuauuccgugcucuauaacucugcauccuuuucuacc
uuuaaauguuauggagucaacgggacaaagcucaaugaccuuugcuuuacaaaugucuaugcagacucuuuugucaucc
guggugaugagguacgacagaucgcgccaggacaaaccgggaagaucgccgauuacaacuacaaacugcccgacgauuuc
accgggugcguuauugcuuggaacuccaauaaucuugauaguaaaguuggcggcaacuacaacuaccuguaucgacuuu
uccguaaaaguaaucucaagccauuugaaagagacaucaacacaacaauuuaucaggcuggaucuaccccaugcaacggc
guugaaggauuuaacugcuacuucccucuccaaaguuacgguuuccaaccaacaaacggcguuggcuaucaaccuuauag
agucguuguccucucuuuugagcuuaaccaugccccagcgacagugugugggccgaagaaaagcacuaauuugguuaag
aauaaauguguuaacuuuaauuuuaauggauugacggggacagggguucugacagagucuaacaagaaauuucugccgu
uccaacaguuugggcgagauauugcagauaccacggacgccguucgagacccccaaacacuugaaauucucgauauaacu
cccugcagcuuuggcgguguauccguuaucacgcccgggacaaauaccaguaaccaagucgcaguccuguaucaagacgu
aaauuguacggaagugcccguugcuauacacgcugaccaacugacucccacauggagagucuauaguacugguucuaau
guguuccaaacacgagccgguugccugaucggagccgaacauguuaacaacucauacgaaugugacauaccgauuggcgc
cggcauuugcgccagcuaucaaacgcagaccaacucaccaagaaggcgucgcaguguagcaagucaaucuauuauagcgu
auaccaugucuuugggagcagaaaacuccguugcuuacucuaauaauucuauugcuaucccaaccaauuuuacaaucuca
guuacuaccgaaauacugccgguaagcaugacuaagacauccguggauugcacuauguacaucuguggggacucaacag
aguguaguaauuugcugcuucaauauggcuccuucugcacucaacugaaucgugcucucacgggaauugcuguugagca
agauaagaauacccaggaaguguuugcccaagucaaacaaauuuauaagacaccaccaauuaaagauuuugguggauuua
auuucagccaaauacuuccagaucccucacgcagacgacggucuuucaucgaggaccuucuguucaacaaaguuacucug
gcugaugcaggcuucauuaagcaguacggugauugucuuggagacaucgcugcgcgcgaccucauaugcgcccagaaau
uuaaugggcugaccguacuucccccuuugcugacugaugagaugauugcacaauacacuuccgcacuccuugcggguac
uaucacauccggguggacuuuuggagcuggcgccgcucuucaaauucccuucgccaugcaaauggcguacagguuuaau
ggcaucggugugacacagaaugugcucuaugagaaccagaaacuuaucgcaaaccaguucaauucagccaucgggaaaau
ccaagauagucucaguaguacugccucagcucucggcaagcuccaggauguagugaaucagaaugcacaagccuugaaca
cucucguuaaacaacuuucuuccaacuuuggugccaucagcagugggccuaacgauauauugagccgcuugcccaaagu
ggaagcggaaguccaaauagauagacuuauuaccggccggcugcaaucucugcaaaccuaugugacucaacaauugaucc
gagcugccgaaauccgugccagugcaaaucucgccgcgaccaagaugagcgaaugugucuugggacagagcaaaagaguc
gauuucugcggaaaaggcuaccaccugaugucuuucccucaaucugccccgcacggaguggucuuucuccaugugacuu
augugccagcccaagaaaagaacuuuacaaccgcaccggcaauuugccaugacggaaaggcgcauuucccccgugaggga
gucuuugugagcaacgggacccauugguucgugacacaacgcaauuucuaugagccucagaucauuaccacggacaauac
uuucgugucuggcaacugugacguggucauaggcaucgugaauaauaccgucuacgaucccuugcaacccgaacuggac
ucauucaaagaagagcuggauaaguauuuuaagaaccauacaagcccugaugucgaucuuggggauauaucaggcauaa
acgcaucuguugugaauauccaaaaggaaauugauagauugaacgaaguugccaagaaccucaaugaaagucuuaucgac
cugcaagaacugggaaaauaugagcaauauauaaaauggccauggagcgggcgccggagacggagaagggguagcggcg
guagugguagcggguacaucccagaggcacccagagauggacaagcuuacguaaggaaggacggggaaugggugcugcu
caguacauuucuuggaugauaa (SEQ ID NO: 129)
MDWTWILFLVAAATRVHSMFVFLVLLPLVSSQCVNLTTRTQLPPAYTNSFTRGVYY
PDKVFRSSVLHSTQDLFLPFFSNVTWFHAIHVSGTNGTKRFDNPVLPFNDGVYFASTE
KSNIIRGWIFGTTLDSKTQSLLIVNNATNVVIKVCEFQFCNDPFLGVYYHKNNKSWM
ESEFRVYSSANNCTFEYVSQPFLMDLEGKQGNFKNLREFVFKNIDGYFKIYSKHTPIN
LVRDLPQGFSALEPLVDLPIGINITRFQTLLALHRSYLTPGDSSSGWTAGAAAYYVGY
LQPRTFLLKYNENGTITDAVDCALDPLSETKCTLKSFTVEKGIYQTSNFRVQPTESIVR
FPNITNLCPFGEVFNATRFASVYAWNRKRISNCVADYSVLYNSASFSTFKCYGV [symbol] T
KLNDLCFTNVYADSFVIRGDEVRQIAPGQTGKIADYNYKLPDDFTGCVIAWNSNNLD
SKVGGNYNYLYRLFRKSNLKPFERDI [symbol] T [symbol] IYQAGSTPCNGVEGFNCYFPLQSYGFQPT
NGVGYQPYRVVVLSFEL [symbol] HAPATVCGPKKSTNLVKNKCVNFNFNGLTGTGVLTESN
KKFLPFQQFGRDIADTTDAVRDPQTLEILDITPCSFGGVSVITPGTNTSNQVAVLYQD
VNCTEVPVAIHADQLTPTWRVYSTGSNVFQTRAGCLIGAEHVNNSYECDIPIGAGICA
SYQTQTNSPRR [symbol] RSVASQSIIAYTMSLGAENSVAYSNNSIAIPTNFTISVTTEILPVSMT
KTSVDCTMYICGDSTECSNLLLQYGSFCTQLNRALTGIAVEQDKNTQEVFAQVKQIY
KTPPIKDFGGFNFSQILPDPS [symbol] RSFIEDLLFNKVTLADAGFIKQYGDCLGDIAARDLI
CAQKFNGLTVLPPLLTDEMIAQYTSALLAGTITSGWTFGAGAALQIPFAMQMAYRFN
GIGVTQNVLYENQKLIANQFNSAIGKIQDSLSSTASALGKLQDVVNQNAQALNTLVK
QLSSNFGAISS [symbol] NDILSRL [symbol] KVEAEVQIDRLITGRLQSLQTYVTQQLIRAAEIRASANL
AATKMSECVLGQSKRVDFCGKGYHLMSFPQSAPHGVVFLHVTYVPAQEKNFTTAPA
ICHDGKAHFPREGVFVSNGTHWFVTQRNFYEPQIITTDNTFVSGNCDVVIGIVNNTVY
DPLQPELDSFKEELDKYFKNHTSPDVDLGDISGINASVVNIQKEIDRLNEVAKNLNES
LIDLQELGKYEQYIKWPWSGRRRRRRGSGGSGSGYIPEAPRDGQAYVRKDGEWVLL
STFLG** (SEQ ID NO: 130)
WuS_3F_D2P_rB_pVax
ggatccgccaccatggattggacatggattctgtttctcgttgccgccgctacgcgcgtgcacagcatgttcgttttcctcgtactgttgcc
tctggtatcatctcaatgtgtgaatcttacgacgaggacgcaactgccaccagcttacaccaactcttttactagaggggtctattacccc
gacaaggttttcagatcctcagtgctgcatagtacacaagatttgtttcttcccttcttctccaatgtcacttggtttcacgctatccacgtgtc
cggcactaatggaacgaagcggtttgataacccggtacttccatttaatgacggggtatactttgcaagcaccgagaaaagtaatatcat
tcgtgggtggatctttggcactacactcgactccaagacacaatcccttttgatagtaaataatgctacaaatgtggttataaaggtgtgcg
agtttcaattctgcaatgaccccttcctcggtgtctattatcacaagaacaataaatcttggatggaaagtgagttcagggtatacagctct
gcaaacaactgcacatttgagtatgtgagccaaccgtttcttatggatctggaaggtaagcagggtaactttaagaaccttcgggagttc
gtctttaagaatatagatggctattttaaaatctatagtaaacacactcctattaaccttgtgcgcgatctccctcaagggttctctgcattgg
aaccgcttgttgatttgcctataggaatcaatattacacgatttcaaacactcctcgctctccataggagctaccttaccccaggcgactca
agctctggttggacggcaggagctgcagcatactatgtgggttatcttcagccgcggacattcttgcttaagtataatgagaatggaact
atcactgacgctgttgactgtgccctggaccctctttcagaaacaaaatgtactctcaaatcattcaccgtggagaagggaatatatcaaa
caagtaactttagggtccaacctaccgagagcatcgtgcgattccctaatattaccaatttgtgtcccttcggtgaagtcttcaacgcgac
ccgctttgctagcgtctatgcgtggaacaggaagcgaattagcaactgtgttgcagattacagtgtgctgtacaatagtgcgagcttttcc
acgttcaaatgctatggcgtgaaacctaccaaacttaatgatttgtgcttcactaatgtttatgctgacagcttcgttatccggggtgatgag
gtgaggcagattgcccccggtcaaactggcaaaattgccgactacaattacaagctccctgatgattttactggatgtgtcatagcgtgg
aattccaataatctggactctaaggttggtggtaattataactatctctaccgcctgtttcgtaagagcaatctgaaaccctttgaaagagat
atttggactgagatatatcaagctggctcaactccttgcaacggggtcgaaggtttcaattgttactttccacttcaatcatacgggtttcaa
ccaactaacggtgtaggttatcaaccctatcgggtggttgtcctgagctttgagctgaaccatgccccggctacagtatgcggcccaaa
gaaatccactaacttggtcaagaacaaatgcgtcaactttaactttaacggactcacggggacaggagtccttaccgaatccaacaaga
aattcttgcctttccaacaatttggacgagacattgcggataccacagacgcagtacgcgacccacagactcttgaaatcctcgacataa
caccctgcagtttcggcggtgtaagtgtcattaccccaggcactaatacgagcaaccaagtggcggtgctctaccaagacgttaattgc
actgaggtcccagtggctattcacgctgaccaacttacacccacatggagagtgtatagtacaggctcaaacgtcttccagacacggg
cggggtgccttattggagcagaacatgttaacaattcctatgaatgcgatatcccgattggagccgggatctgtgctagctatcaaaccc
aaacaaatagccccagacgtcgacgttccgtggctagtcaaagcatcatcgcctacactatgagtcttggggccgaaaattccgttgctt
acagtaacaacagtatcgctatccccaccaattttactattagtgtaactacagagattctgccggtttccatgacaaagacttccgtggat
tgtacgatgtatatttgcggcgacagcacagagtgcagcaatctgctgctgcaatacggtagtttctgcacccaattgaaccgtgctctg
acgggaattgcagttgagcaggacaagaatactcaagaagtatttgcacaagtcaaacagatatacaagacgcccccgattaaagattt
cggcgggtttaactttagccaaattcttccggaccccagcagacgccgccgaagctttattgaggacctgctgtttaataaagttaccctt
gctgatgctggttttatcaagcaatacggagattgcctgggagatatcgccgccagggatttgatctgtgcgcaaaagtttaacggcctt
accgttctcccgccccttctgaccgatgaaatgatagcccaatacacttccgcactcctggcaggcacaattacttccggctggacgttt
ggggccggggcagccttgcaaattccgtttgctatgcaaatggcatatcgtttcaatggtatcggcgtaacacaaaatgtcctttatgaga
accagaaactcattgctaatcagtttaattccgctatcggcaagattcaagacagtctcagcagcacggcgagcgcacttggtaaacttc
aagacgttgtcaaccagaatgctcaagccctgaacactctggtaaaacaacttagctctaatttcggtgcaattagctccggtccgaacg
atattctgtcacggctcccgaaagtcgaagccgaagtccagatcgataggctgatcacagggcgcttgcagagtctccaaacctacgt
gacgcaacaactcattcgggcggctgaaattcgtgcaagcgctaatctggccgctaccaaaatgagtgagtgtgttctcggtcaatcaa
agagggttgacttttgcggcaaaggatatcatttgatgagttttccgcaatctgcccctcatggggtagtatttctgcacgtaacttatgtac
cagcacaagaaaagaacttcaccacggccccagcaatatgccacgatggcaaagctcatttccctcgcgaaggggtctttgtaagca
atggaacccactggtttgtcacacaacgcaacttttatgagcctcaaatcattacaaccgataacacttttgtctccgggaactgcgacgt
ggtgattggaatcgtcaacaacactgtctatgatcccctgcaacctgaactggattcctttaaagaagagcttgataagtatttcaagaac
cataccagccccgacgtcgatttgggagatattagtgggattaatgctagcgttgttaatatacaaaaggaaatagatcgattgaatgaa
gtggccaagaatctgaatgagtctctgattgacctgcaggagctcggaaagtatgagcaatatataaaatggccctggtcaggccgca
ggcgtcggcggcgcggtagcggcggttcaggatctgggtatatacctgaggccccacgagatgggcaggcttatgtacggaaagat
ggagaatgggtgttgctgagtactttcctcgggtaataa (SEQ ID NO: 131)
ggauccgccaccauggauuggacauggauucuguuucucguugccgccgcuacgcgcgugcacagcauguucguuuucc
ucguacuguugccucugguaucaucucaaugugugaaucuuacgacgaggacgcaacugccaccagcuuacaccaacucu
uuuacuagaggggucuauuaccccgacaagguuuucagauccucagugcugcauaguacacaagauuuguuucuucccu
ucuucuccaaugucacuugguuucacgcuauccacguguccggcacuaauggaacgaagcgguuugauaacccgguacu
uccauuuaaugacgggguauacuuugcaagcaccgagaaaaguaauaucauucguggguggaucuuuggcacuacacuc
gacuccaagacacaaucccuuuugauaguaaauaaugcuacaaaugugguuauaaaggugugcgaguuucaauucugca
augaccccuuccucggugucuauuaucacaagaacaauaaaucuuggauggaaagugaguucaggguauacagcucugc
aaacaacugcacauuugaguaugugagccaaccguuucuuauggaucuggaagguaagcaggguaacuuuaagaaccuu
cgggaguucgucuuuaagaauauagauggcuauuuuaaaaucuauaguaaacacacuccuauuaaccuugugcgcgauc
ucccucaaggguucucugcauuggaaccgcuuguugauuugccuauaggaaucaauauuacacgauuucaaacacuccu
cgcucuccauaggagcuaccuuaccccaggcgacucaagcucugguuggacggcaggagcugcagcauacuaugugggu
uaucuucagccgcggacauucuugcuuaaguauaaugagaauggaacuaucacugacgcuguugacugugcccuggacc
cucuuucagaaacaaaauguacucucaaaucauucaccguggagaagggaauauaucaaacaaguaacuuuaggguccaa
ccuaccgagagcaucgugcgauucccuaauauuaccaauuugugucccuucggugaagucuucaacgcgacccgcuuug
cuagcgucuaugcguggaacaggaagcgaauuagcaacuguguugcagauuacagugugcuguacaauagugcgagcuu
uuccacguucaaaugcuauggcgugaaaccuaccaaacuuaaugauuugugcuucacuaauguuuaugcugacagcuuc
guuauccggggugaugaggugaggcagauugcccccggucaaacuggcaaaauugccgacuacaauuacaagcucccug
augauuuuacuggaugugucauagcguggaauuccaauaaucuggacucuaagguuggugguaauuauaacuaucucu
accgccuguuucguaagagcaaucugaaacccuuugaaagagauauuuggacugagauauaucaagcuggcucaacucc
uugcaacggggucgaagguuucaauuguuacuuuccacuucaaucauacggguuucaaccaacuaacgguguagguuau
caacccuaucgggugguuguccugagcuuugagcugaaccaugccccggcuacaguaugcggcccaaagaaauccacuaa
cuuggucaagaacaaaugcgucaacuuuaacuuuaacggacucacggggacaggaguccuuaccgaauccaacaagaaau
ucuugccuuuccaacaauuuggacgagacauugcggauaccacagacgcaguacgcgacccacagacucuugaaauccuc
gacauaacacccugcaguuucggcgguguaagugucauuaccccaggcacuaauacgagcaaccaaguggcggugcucua
ccaagacguuaauugcacugaggucccaguggcuauucacgcugaccaacuuacacccacauggagaguguauaguacag
gcucaaacgucuuccagacacgggcggggugccuuauuggagcagaacauguuaacaauuccuaugaaugcgauauccc
gauuggagccgggaucugugcuagcuaucaaacccaaacaaauagccccagacgucgacguuccguggcuagucaaagca
ucaucgccuacacuaugagucuuggggccgaaaauuccguugcuuacaguaacaacaguaucgcuauccccaccaauuuu
acuauuaguguaacuacagagauucugccgguuuccaugacaaagacuuccguggauuguacgauguauauuugcggcg
acagcacagagugcagcaaucugcugcugcaauacgguaguuucugcacccaauugaaccgugcucugacgggaauugc
aguugagcaggacaagaauacucaagaaguauuugcacaagucaaacagauauacaagacgcccccgauuaaagauuucg
gcggguuuaacuuuagccaaauucuuccggaccccagcagacgccgccgaagcuuuauugaggaccugcuguuuaauaa
aguuacccuugcugaugcugguuuuaucaagcaauacggagauugccugggagauaucgccgccagggauuugaucug
ugcgcaaaaguuuaacggccuuaccguucucccgccccuucugaccgaugaaaugauagcccaauacacuuccgcacucc
uggcaggcacaauuacuuccggcuggacguuuggggccggggcagccuugcaaauuccguuugcuaugcaaauggcaua
ucguuucaaugguaucggcguaacacaaaauguccuuuaugagaaccagaaacucauugcuaaucaguuuaauuccgcu
aucggcaagauucaagacagucucagcagcacggcgagcgcacuugguaaacuucaagacguugucaaccagaaugcuca
agcccugaacacucugguaaaacaacuuagcucuaauuucggugcaauuagcuccgguccgaacgauauucugucacggc
ucccgaaagucgaagccgaaguccagaucgauaggcugaucacagggcgcuugcagagucuccaaaccuacgugacgcaa
caacucauucgggcggcugaaauucgugcaagcgcuaaucuggccgcuaccaaaaugagugaguguguucucggucaau
caaagaggguugacuuuugcggcaaaggauaucauuugaugaguuuuccgcaaucugccccucaugggguaguauuuc
ugcacguaacuuauguaccagcacaagaaaagaacuucaccacggccccagcaauaugccacgauggcaaagcucauuucc
cucgcgaaggggucuuuguaagcaauggaacccacugguuugucacacaacgcaacuuuuaugagccucaaaucauuaca
accgauaacacuuuugucuccgggaacugcgacguggugauuggaaucgucaacaacacugucuaugauccccugcaacc
ugaacuggauuccuuuaaagaagagcuugauaaguauuucaagaaccauaccagccccgacgucgauuugggagauauu
agugggauuaaugcuagcguuguuaauauacaaaaggaaauagaucgauugaaugaaguggccaagaaucugaaugagu
cucugauugaccugcaggagcucggaaaguaugagcaauauauaaaauggcccuggucaggccgcaggcgucggcggcg
cgguagcggcgguucaggaucuggguauauaccugaggccccacgagaugggcaggcuuauguacggaaagauggagaa
uggguguugcugaguacuuuccucggguaauaa (SEQ ID NO: 132)
MDWTWILFLVAAATRVHSMFVFLVLLPLVSSQCVNLTTRTQLPPAYTNSFTRGVYY
PDKVFRSSVLHSTQDLFLPFFSNVTWFHAIHVSGTNGTKRFDNPVLPFNDGVYFASTE
KSNIIRGWIFGTTLDSKTQSLLIVNNATNVVIKVCEFQFCNDPFLGVYYHKNNKSWM
ESEFRVYSSANNCTFEYVSQPFLMDLEGKQGNFKNLREFVFKNIDGYFKIYSKHTPIN
LVRDLPQGFSALEPLVDLPIGINITRFQTLLALHRSYLTPGDSSSGWTAGAAAYYVGY
LQPRTFLLKYNENGTITDAVDCALDPLSETKCTLKSFTVEKGIYQTSNFRVQPTESIVR
FPNITNLCPFGEVFNATRFASVYAWNRKRISNCVADYSVLYNSASFSTFKCYGV [symbol] PT
KLNDLCFTNVYADSFVIRGDEVRQIAPGQTGKIADYNYKLPDDFTGCVIAWNSNNLD
SKVGGNYNYLYRLFRKSNLKPFERDI [symbol] TEIYQAGSTPCNGVEGFNCYFPLQSYGFQP
TNGVGYQPYRVVVLSFEL [symbol] HAPATVCGPKKSTNLVKNKCVNFNFNGLTGTGVLTES
NKKFLPFQQFGRDIADTTDAVRDPQTLEILDITPCSFGGVSVITPGTNTSNQVAVLYQ
DVNCTEVPVAIHADQLTPTWRVYSTGSNVFQTRAGCLIGAEHVNNSYECDIPIGAGIC
ASYQTQTNSPRR [symbol] RSVASQSIIAYTMSLGAENSVAYSNNSIAIPTNFTISVTTEILPVSM
TKTSVDCTMYICGDSTECSNLLLQYGSFCTQLNRALTGIAVEQDKNTQEVFAQVKQI
YKTPPIKDFGGFNFSQILPDPS [symbol] RSFIEDLLFNKVTLADAGFIKQYGDCLGDIAARD
LICAQKFNGLTVLPPLLTDEMIAQYTSALLAGTITSGWTFGAGAALQIPFAMQMAYR
FNGIGVTQNVLYENQKLIANQFNSAIGKIQDSLSSTASALGKLQDVVNQNAQALNTL
VKQLSSNFGAISS [symbol] NDILSRL [symbol] KVEAEVQIDRLITGRLQSLQTYVTQQLIRAAEIRASA
NLAATKMSECVLGQSKRVDFCGKGYHLMSFPQSAPHGVVFLHVTYVPAQEKNFTT
APAICHDGKAHFPREGVFVSNGTHWFVTQRNFYEPQIITTDNTFVSGNCDVVIGIVNN
TVYDPLQPELDSFKEELDKYFKNHTSPDVDLGDISGINASVVNIQKEIDRLNEVAKNL
NESLIDLQELGKYEQYIKWPWSGRRRRRRGSGGSGSGYIPEAPRDGQAYVRKDGEW
VLLSTFLG** (SEQ ID NO: 133)
WuS_3F_D2P_pVax
ggatccgccaccatggactggacctggatactctttctcgtagcagcagccacacgagtgcattcaatgtttgtcttcttggtcctcttgcc
actggttagctcccagtgtgtgaatcttactacaaggacacaactgcccccagcttacacaaactcctttactaggggtgtatattaccca
gacaaagtgtttcgcagttctgtcctgcatagcacccaagaccttttccttccgttcttcagcaacgtcacctggttccatgctatccatgtc
agtggaacgaatggcacaaagcggttcgataaccctgtcctgccctttaacgacggcgtctatttcgcttcaacagagaagagtaacat
tatcagaggatggatatttggtacaactcttgatagcaagacacaaagcctgctgattgtaaacaacgcgacaaatgtcgtcatcaaggt
ttgcgagtttcaattttgcaacgatcccttcttgggcgtgtactatcataagaacaataaaagctggatggagagcgaatttagggtgtata
gctcagctaataactgtacatttgaatatgtctctcaacccttcctcatggaccttgagggaaagcaaggaaatttcaagaatctcagaga
atttgtcttcaagaacatcgacgggtatttcaagatctactccaagcatacacccatcaacttggttagggaccttccgcaaggtttctcag
cactggagcctctggtagatctccctattgggattaatattacaagatttcaaacactcctggccttgcatagatcctatcttacccctggg
gattccagctcaggttggaccgcgggtgccgcggcgtactatgtcggatatctccaacctcggacattcctgctgaaatacaatgaaaa
tgggaccatcactgatgccgttgattgtgctctcgatcctctgagtgagaccaaatgcactcttaagagttttacagtggagaaaggtatc
tatcaaactagtaatttcagagttcaaccaaccgagtcaatagtgcgttttccaaatatcactaatctgtgtccatttggggaagtcttcaat
gctacccgattcgcaagtgtgtacgcctggaaccggaaacggatttctaactgcgttgccgattatagtgtcctctataattctgcttctttc
tctacttttaagtgctatggggtgtcccccaccaagctgaacgatctgtgtttcactaacgtctacgccgatagttttgtcattagagggga
cgaggtacggcaaatcgcgcccggccaaacggggaaaattgccgattacaactacaagcttccagacgacttcacaggttgcgtgat
tgcatggaattctaataatctggacagtaaagtgggcggcaactataactatctttaccggctgtttcggaagagcaacttgaagcccttc
gaacgcgacatatccaccgagatctatcaagccggaagtaccccgtgcaacggggtagaaggatttaattgttattttccattgcagtctt
atggatttcagcccaccaatggtgtgggataccaaccttatagggttgttgttctctccttcgaactcctgcacgctccagctactgtatgt
gggcctaagaaaagtactaatctcgttaagaataaatgcgtcaatttcaatttcaacggcttgaccgggactggagtgctcaccgaaag
caacaagaagtttctcccgtttcagcaattcggtagggatattgccgatacgacagatgcagtacgagatccccaaacactcgaaatcc
tggacattacgccatgtagctttggcggagtaagtgtcatcaccccagggactaacaccagtaaccaagttgcggtactctatcaggat
gtgaactgcactgaggtacctgtagcaattcacgcagaccaattgacgccgacgtggcgcgtctatagtacaggaagtaacgtctttca
gacaagagcgggttgtttgattggcgctgaacacgttaacaattcttacgagtgtgatatccccatcggtgcggggatctgcgccagct
atcagacacaaaccaattccccacgaaggagacgttccgtggccagccagtcaataatcgcgtatactatgtctctgggtgcggagaa
ttcagtggcctattccaataattctatagccattccaaccaattttactataagcgtcactacagagatcttgccagttagcatgacgaaaac
cagcgtcgattgtaccatgtatatatgcggcgacagtaccgaatgctcaaatctgctgctccaatatggctcattttgcactcaacttaata
gagctctgacagggatcgctgtcgaacaagataagaacactcaggaagttttcgcccaagttaagcagatatacaagaccccgcccat
caaggattttggcggatttaatttctctcagatcctgccggaccctagccgccgacgccggagctttatcgaagacttgctgtttaataag
gttactctcgcagatgcaggcttcatcaagcaatacggtgactgccttggggatatcgctgctcgggacctgatctgtgctcagaaattc
aacggtctcacggtgctgcccccactcctgaccgacgaaatgattgcccagtatacgtccgcattgctcgctggcaccatcactagcg
gctggacctttggggccggagccgcgctccaaataccttttgctatgcaaatggcttatcgcttcaatggtattggggttacgcaaaatgt
cctctacgaaaatcaaaagctcatagctaaccaattcaatagcgctatagggaaaattcaagacagcctgagttccacagcaagcgcc
ctcggcaaacttcaagatgtagtgaaccaaaatgctcaagcactcaatacactggtcaaacaactctcaagcaatttcggggcaatctc
atctggtcctaatgacatattgagcaggctccccaaagtggaagcagaagtacaaatcgacaggctgattaccggacgactccaaagc
ttgcaaacttatgtaacccaacaacttatcagggctgcagaaatccgtgcaagcgctaacctcgccgctacgaagatgtcagaatgtgt
acttgggcagtctaagagggttgatttctgtggaaaagggtaccatctgatgagttttccacagagcgctccacatggggtggtgtttctg
catgtaacctatgttcccgctcaagaaaagaattttactactgcccccgcaatttgccatgacgggaaagcccatttcccccgagaggg
agttttcgtgagtaacggaacgcactggtttgtcactcagagaaatttctacgagccccaaatcattacgaccgataatacattcgtaagc
ggtaactgcgatgtcgtcattggcatcgttaacaacactgtttatgatccccttcaacccgagcttgactcatttaaagaggaactggataa
gtactttaagaatcacacctctcccgatgtcgacctgggcgacatctctggaattaatgcctctgtcgtaaacatccaaaaggaaattgac
cgactgaatgaggtggcaaagaatcttaatgaatccctgatcgatctgcaggagcttgggaagtatgagcaatacatcaaatggccatg
gtctggcagacggcgccggagaaggggctctggcggctctggaagcgggtatattccagaggcgcccagggatgggcaagcatat
gttcggaaggatggggagtgggtgttgttgtccacgttccttggctagtga (SEQ ID NO: 134)
ggauccgccaccauggacuggaccuggauacucuuucucguagcagcagccacacgagugcauucaauguuugucuucu
ugguccucuugccacugguuagcucccagugugugaaucuuacuacaaggacacaacugcccccagcuuacacaaacucc
uuuacuagggguguauauuacccagacaaaguguuucgcaguucuguccugcauagcacccaagaccuuuuccuuccgu
ucuucagcaacgucaccugguuccaugcuauccaugucaguggaacgaauggcacaaagcgguucgauaacccuguccu
gcccuuuaacgacggcgucuauuucgcuucaacagagaagaguaacauuaucagaggauggauauuugguacaacucuu
gauagcaagacacaaagccugcugauuguaaacaacgcgacaaaugucgucaucaagguuugcgaguuucaauuuugcaa
cgaucccuucuugggcguguacuaucauaagaacaauaaaagcuggauggagagcgaauuuaggguguauagcucagcu
aauaacuguacauuugaauaugucucucaacccuuccucauggaccuugagggaaagcaaggaaauuucaagaaucucag
agaauuugucuucaagaacaucgacggguauuucaagaucuacuccaagcauacacccaucaacuugguuagggaccuuc
cgcaagguuucucagcacuggagccucugguagaucucccuauugggauuaauauuacaagauuucaaacacuccuggc
cuugcauagauccuaucuuaccccuggggauuccagcucagguuggaccgcgggugccgcggcguacuaugucggauau
cuccaaccucggacauuccugcugaaauacaaugaaaaugggaccaucacugaugccguugauugugcucucgauccucu
gagugagaccaaaugcacucuuaagaguuuuacaguggagaaagguaucuaucaaacuaguaauuucagaguucaaccaa
ccgagucaauagugcguuuuccaaauaucacuaaucuguguccauuuggggaagucuucaaugcuacccgauucgcaag
uguguacgccuggaaccggaaacggauuucuaacugcguugccgauuauaguguccucuauaauucugcuucuuucucu
acuuuuaagugcuauggggugucccccaccaagcugaacgaucuguguuucacuaacgucuacgccgauaguuuuguca
uuagaggggacgagguacggcaaaucgcgcccggccaaacggggaaaauugccgauuacaacuacaagcuuccagacgac
uucacagguugcgugauugcauggaauucuaauaaucuggacaguaaagugggcggcaacuauaacuaucuuuaccggc
uguuucggaagagcaacuugaagcccuucgaacgcgacauauccaccgagaucuaucaagccggaaguaccccgugcaac
gggguagaaggauuuaauuguuauuuuccauugcagucuuauggauuucagcccaccaauggugugggauaccaaccu
uauaggguuguuguucucuccuucgaacuccugcacgcuccagcuacuguaugugggccuaagaaaaguacuaaucucg
uuaagaauaaaugcgucaauuucaauuucaacggcuugaccgggacuggagugcucaccgaaagcaacaagaaguuucuc
ccguuucagcaauucgguagggauauugccgauacgacagaugcaguacgagauccccaaacacucgaaauccuggacau
uacgccauguagcuuuggcggaguaagugucaucaccccagggacuaacaccaguaaccaaguugcgguacucuaucag
gaugugaacugcacugagguaccuguagcaauucacgcagaccaauugacgccgacguggcgcgucuauaguacaggaa
guaacgucuuucagacaagagcggguuguuugauuggcgcugaacacguuaacaauucuuacgagugugauauccccau
cggugcggggaucugcgccagcuaucagacacaaaccaauuccccacgaaggagacguuccguggccagccagucaauaa
ucgcguauacuaugucucugggugcggagaauucaguggccuauuccaauaauucuauagccauuccaaccaauuuuac
uauaagcgucacuacagagaucuugccaguuagcaugacgaaaaccagcgucgauuguaccauguauauaugcggcgaca
guaccgaaugcucaaaucugcugcuccaauauggcucauuuugcacucaacuuaauagagcucugacagggaucgcugu
cgaacaagauaagaacacucaggaaguuuucgcccaaguuaagcagauauacaagaccccgcccaucaaggauuuuggcg
gauuuaauuucucucagauccugccggacccuagccgccgacgccggagcuuuaucgaagacuugcuguuuaauaaggu
uacucucgcagaugcaggcuucaucaagcaauacggugacugccuuggggauaucgcugcucgggaccugaucugugcu
cagaaauucaacggucucacggugcugcccccacuccugaccgacgaaaugauugcccaguauacguccgcauugcucgc
uggcaccaucacuagcggcuggaccuuuggggccggagccgcgcuccaaauaccuuuugcuaugcaaauggcuuaucgc
uucaaugguauugggguuacgcaaaauguccucuacgaaaaucaaaagcucauagcuaaccaauucaauagcgcuauagg
gaaaauucaagacagccugaguuccacagcaagcgcccucggcaaacuucaagauguagugaaccaaaaugcucaagcac
ucaauacacuggucaaacaacucucaagcaauuucggggcaaucucaucugguccuaaugacauauugagcaggcucccc
aaaguggaagcagaaguacaaaucgacaggcugauuaccggacgacuccaaagcuugcaaacuuauguaacccaacaacu
uaucagggcugcagaaauccgugcaagcgcuaaccucgccgcuacgaagaugucagaauguguacuugggcagucuaag
aggguugauuucuguggaaaaggguaccaucugaugaguuuuccacagagcgcuccacauggggugguguuucugcau
guaaccuauguucccgcucaagaaaagaauuuuacuacugcccccgcaauuugccaugacgggaaagcccauuucccccg
agagggaguuuucgugaguaacggaacgcacugguuugucacucagagaaauuucuacgagccccaaaucauuacgacc
gauaauacauucguaagcgguaacugcgaugucgucauuggcaucguuaacaacacuguuuaugauccccuucaacccg
agcuugacucauuuaaagaggaacuggauaaguacuuuaagaaucacaccucucccgaugucgaccugggcgacaucucu
ggaauuaaugccucugucguaaacauccaaaaggaaauugaccgacugaaugagguggcaaagaaucuuaaugaaucccu
gaucgaucugcaggagcuugggaaguaugagcaauacaucaaauggccauggucuggcagacggcgccggagaaggggc
ucuggcggcucuggaagcggguauauuccagaggcgcccagggaugggcaagcauauguucggaaggauggggagugg
guguuguuguccacguuccuuggcuaguga (SEQ ID NO: 135)
MDWTWILFLVAAATRVHSMFVFLVLLPLVSSQCVNLTTRTQLPPAYTNSFTRGVYY
PDKVFRSSVLHSTQDLFLPFFSNVTWFHAIHVSGTNGTKRFDNPVLPFNDGVYFASTE
KSNIIRGWIFGTTLDSKTQSLLIVNNATNVVIKVCEFQFCNDPFLGVYYHKNNKSWM
ESEFRVYSSANNCTFEYVSQPFLMDLEGKQGNFKNLREFVFKNIDGYFKIYSKHTPIN
LVRDLPQGFSALEPLVDLPIGINITRFQTLLALHRSYLTPGDSSSGWTAGAAAYYVGY
LQPRTFLLKYNENGTITDAVDCALDPLSETKCTLKSFTVEKGIYQTSNFRVQPTESIVR
FPNITNLCPFGEVFNATRFASVYAWNRKRISNCVADYSVLYNSASFSTFKCYGVSPTK
LNDLCFTNVYADSFVIRGDEVRQIAPGQTGKIADYNYKLPDDFTGCVIAWNSNNLDS
KVGGNYNYLYRLFRKSNLKPFERDISTEIYQAGSTPCNGVEGFNCYFPLQSYGFQPTN
GVGYQPYRVVVLSFELLHAPATVCGPKKSTNLVKNKCVNFNFNGLTGTGVLTESNK
KFLPFQQFGRDIADTTDAVRDPQTLEILDITPCSFGGVSVITPGTNTSNQVAVLYQDV
NCTEVPVAIHADQLTPTWRVYSTGSNVFQTRAGCLIGAEHVNNSYECDIPIGAGICAS
YQTQTNSPRRRRSVASQSIIAYTMSLGAENSVAYSNNSIAIPTNFTISVTTEILPVSMTK
TSVDCTMYICGDSTECSNLLLQYGSFCTQLNRALTGIAVEQDKNTQEVFAQVKQIYK
TPPIKDFGGFNFSQILPDPSRRRRSFIEDLLFNKVTLADAGFIKQYGDCLGDIAARDLIC
AQKFNGLTVLPPLLTDEMIAQYTSALLAGTITSGWTFGAGAALQIPFAMQMAYRFNG
IGVTQNVLYENQKLIANQFNSAIGKIQDSLSSTASALGKLQDVVNQNAQALNTLVKQ
LSSNFGAISSGPNDILSRLPKVEAEVQIDRLITGRLQSLQTYVTQQLIRAAEIRASANLA
ATKMSECVLGQSKRVDFCGKGYHLMSFPQSAPHGVVFLHVTYVPAQEKNFTTAPAI
CHDGKAHFPREGVFVSNGTHWFVTQRNFYEPQIITTDNTFVSGNCDVVIGIVNNTVY
DPLQPELDSFKEELDKYFKNHTSPDVDLGDISGINASVVNIQKEIDRLNEVAKNLNES
LIDLQELGKYEQYIKWPWSGRRRRRRGSGGSGSGYIPEAPRDGQAYVRKDGEWVLL
STFLG** (SEQ ID NO: 136)
WuS_3F_2P_GlyDSol_pVax
ggatccgccaccatggactggacatggattttgtttcttgtggcggctgcaacgcgagttcattccatgtttgttttcctggttctcttgccg
ctcgtctctagtcaatgcgtcaatctgacgacaagaacgcaacttccccctgcctacaccaatagttttacccgtggcgtctattatccag
ataaagtgtttcgaagttcctgccttcattccacgcaagatctcttccttccattcttctctaatgtcacctggtttcatgcgatccacgtgtct
ggaaccaacgggactaaacgattcgacaatcccgtcctgccatttaacgatggagtatacttcgcatccaccgagaaatctggcattat
aagagggtggatattcgggactacactcgacagcaagacacaaagtctcctgattgttaacaacgcgacaaacgtcgtaattaaagttt
gcgaatttcaattttgtaatgacccgttcttgggcgtgtattatcacaagaataacaaaagttggatggaatccgaattccgggtttattcca
gcgcgaataattgcacatttgaatacgttagccaacctttcctgatggatctcgaaggcaaacaaggaaactttaagaatcttcgggaatt
cgttttcaagaacatcgacgggtactttaagatatactcaaaacacaccccaattaatttggtccgagatctgccgcaaggctttagtgcg
cttgagcccctcgtagatctcccaattggtattaatatcacacgctttcaaaccctgctggcattgcatcggagctatctgactcccggcg
atagttcttcagggtggacggcgggtgccgctgcttactatgtaggctatctgcagcctcgtacatttctcctcaaatacaatgaaaatgg
cactattaccgacgccgttgattgcgctctggacccactgagcgagactaaatgcaccctcaaatcattcactgttgagaagggaattta
ccaaacatcaaacttcagggtccaacctacggaaagcatcgtgcggttccccaacatcactaacctctgcccctttggagaagtatttaa
cgctacaaggttcgcttccgtctacgcctggaacaggaaaagaatcagtaattgcgtggctgattactccgtgctgtacaattccgcctc
attttctacatttaagtgttatggcgttaacgggactaagcttaacgacctctgcttcacaaacgtctatgccgacagctttgtcattcgcgg
ggatgaagtaagacagatagcacccggtcaaactggcaaaattgctgattacaattacaagttgccagatgatttcactggatgcgttat
agcatggaactctaacaaccttgactcaaaggttggtggcaactataattatttgtatcgcctgtttcgcaaatctaatctcaagcctttcga
gcgcgacataaatacgaccatataccaagcggggtccaccccttgtaatggagtcgaggggtttaattgctattttccgttgcaatcctac
gggttccaaccaacaaacggcgtcggctatcaaccctatcgggttgtcgtactctcattcgagctcaaccatgcaccagcaacagtttgt
ggccccaagaagagcacaaatttggtcaagaataaatgcgttaattttaatttcaatggtctgactggcacaggggttcttaccgaatcaa
ataagaagtttctgccatttcagcagttcggaagggactgtgcagggaccacagatgccgttagagacccccaaacactcgaaattctg
gacatcacgccatgcagtttcggtggtgttagcgtgattactccgggtactaatacgtccaaccaagtggctgtgttgtatcaagacgtta
actgtaccgaagttcctgtagcaatccatgccggtcaactgacccccacgtggcgagtttatagcaccggttccaacgtctttcaaacaa
gagccggatgtctcataggcgctgaacatgtgaataattcatacgaatgtgacattccaatcggcgcagggatttgcgcctcatatcaga
cacaaactaactccccgagaagacgtcgctcagtggcgtcacaaagcatcatcgcttatacgatgagcctctgcgccgagaactctgt
cgcatattctaacaactctattgcaattcctacaaattttacaatttcttgcactactgagatcctgcccgtaagcatgacgaaaacatcctg
cgactgcacaatgtatatctgtggcgactcaactgagtgctccaatctcctcttgcaatacggatctttctgtactcaactcaacagagcac
ttacaggaatagccgtcgaacaagacaagaacacacaagaggtcttcgcccaagtaaagcaatgttacaaaaccccacctattaaaga
ctttggtgggtttaatttctcacagattcttccagatccttcccgtagaaggagaagctttattgaagacctcttgtttaataaagtcactcttg
cagacgctgggtttattaaacaatatggagactgcttgggagacatagcggcaagagacctgatctgcgctcaaaagtttaatgggtgc
actgtgttgccaccccttctgaccgacgagatgatcgctcagtataccagtgccttgctggcagggaccataactagcggatggactttc
ggtgcaggagctgctctgcaaatcccttttgcgatgcaaatggcctacaggtttaatggtataggagttactcagaatgtcctgtacgaaa
atcaaaagctgatcgccaatcaattcaacagtgctattgggaaaatacaggacagtttgagttcaacagcgagcgctctcggcaaactg
caggatgttgtgaatcaaaacgcgcaagctttgaacactcttgtgaagcagctttcatccaacttcggagcgatctcatccgtcctgaac
gacatattgtcaagacttgacccacctgaagcggaagttcagatagaccgactcataacgggccgacttcagtccttgcagacatacgt
gacccaacaacttatccgcgcagccgaaataagggcttcagctaaccttgcagcaaccaaaatgtcagagtgcgtgctcggtcaaag
caagcgggtagacttttgtggcaaggggtatcatcttatgtcctttcctcaatccgcccctcacggggtggtcttcttgcactgcacttatgt
acctgctcaagagaagaattttacgaccgcccctgcgatctgtcacgacgggaaagcacatttcccccgcgagggagtctttgtgtcta
atggtactcattggtttgttacgcagcggaacttttacgaacctcaaataattacaacggataatacagatgttagtgggaattgcgacgtg
gtgatcggtatagtcaacaatacggtgtatgatccacttcaaccagaacttgattcctttaaggaagagctggacaaatatttcaagaacc
atacatcccctgacgtggaccttggcgatataagcggcattaatgcttcagtggtcaatatacaaaaggaaatcgatcgcctgaatgag
gtcgcaaagaatttgaatgagtccctgatcgacctgcaagagctcgggaaatatgagcagtacatcaagtggccctggtcaggtagac
gtaggcggcgccggggcagtggcggctcagggagcggttatatacccgaagcccctagagatgggcaagcttatgtccgaaagga
cggcgaatgggtgctcctttccactttcttgggataatag (SEQ ID NO: 137)
ggauccgccaccauggacuggacauggauuuuguuucuuguggcggcugcaacgcgaguucauuccauguuuguuuuc
cugguucucuugccgcucgucucuagucaaugcgucaaucugacgacaagaacgcaacuucccccugccuacaccaauag
uuuuacccguggcgucuauuauccagauaaaguguuucgaaguuccugccuucauuccacgcaagaucucuuccuucca
uucuucucuaaugucaccugguuucaugcgauccacgugucuggaaccaacgggacuaaacgauucgacaaucccgucc
ugccauuuaacgauggaguauacuucgcauccaccgagaaaucuggcauuauaagaggguggauauucgggacuacacu
cgacagcaagacacaaagucuccugauuguuaacaacgcgacaaacgucguaauuaaaguuugcgaauuucaauuuugua
augacccguucuugggcguguauuaucacaagaauaacaaaaguuggauggaauccgaauuccggguuuauuccagcgc
gaauaauugcacauuugaauacguuagccaaccuuuccugauggaucucgaaggcaaacaaggaaacuuuaagaaucuuc
gggaauucguuuucaagaacaucgacggguacuuuaagauauacucaaaacacaccccaauuaauuugguccgagaucug
ccgcaaggcuuuagugcgcuugagccccucguagaucucccaauugguauuaauaucacacgcuuucaaacccugcugg
cauugcaucggagcuaucugacucccggcgauaguucuucaggguggacggcgggugccgcugcuuacuauguaggcu
aucugcagccucguacauuucuccucaaauacaaugaaaauggcacuauuaccgacgccguugauugcgcucuggaccca
cugagcgagacuaaaugcacccucaaaucauucacuguugagaagggaauuuaccaaacaucaaacuucaggguccaacc
uacggaaagcaucgugcgguuccccaacaucacuaaccucugccccuuuggagaaguauuuaacgcuacaagguucgcuu
ccgucuacgccuggaacaggaaaagaaucaguaauugcguggcugauuacuccgugcuguacaauuccgccucauuuuc
uacauuuaaguguuauggcguuaacgggacuaagcuuaacgaccucugcuucacaaacgucuaugccgacagcuuuguc
auucgcggggaugaaguaagacagauagcacccggucaaacuggcaaaauugcugauuacaauuacaaguugccagauga
uuucacuggaugcguuauagcauggaacucuaacaaccuugacucaaagguugguggcaacuauaauuauuuguaucgc
cuguuucgcaaaucuaaucucaagccuuucgagcgcgacauaaauacgaccauauaccaagcgggguccaccccuuguaa
uggagucgagggguuuaauugcuauuuuccguugcaauccuacggguuccaaccaacaaacggcgucggcuaucaaccc
uaucggguugucguacucucauucgagcucaaccaugcaccagcaacaguuuguggccccaagaagagcacaaauuugg
ucaagaauaaaugcguuaauuuuaauuucaauggucugacuggcacagggguucuuaccgaaucaaauaagaaguuucu
gccauuucagcaguucggaagggacugugcagggaccacagaugccguuagagacccccaaacacucgaaauucuggaca
ucacgccaugcaguuucggugguguuagcgugauuacuccggguacuaauacguccaaccaaguggcuguguuguauca
agacguuaacuguaccgaaguuccuguagcaauccaugccggucaacugacccccacguggcgaguuuauagcaccggu
uccaacgucuuucaaacaagagccggaugucucauaggcgcugaacaugugaauaauucauacgaaugugacauuccaau
cggcgcagggauuugcgccucauaucagacacaaacuaacuccccgagaagacgucgcucaguggcgucacaaagcauca
ucgcuuauacgaugagccucugcgccgagaacucugucgcauauucuaacaacucuauugcaauuccuacaaauuuuaca
auuucuugcacuacugagauccugcccguaagcaugacgaaaacauccugcgacugcacaauguauaucuguggcgacuc
aacugagugcuccaaucuccucuugcaauacggaucuuucuguacucaacucaacagagcacuuacaggaauagccgucg
aacaagacaagaacacacaagaggucuucgcccaaguaaagcaauguuacaaaaccccaccuauuaaagacuuugguggg
uuuaauuucucacagauucuuccagauccuucccguagaaggagaagcuuuauugaagaccucuuguuuaauaaaguca
cucuugcagacgcuggguuuauuaaacaauauggagacugcuugggagacauagcggcaagagaccugaucugcgcuca
aaaguuuaaugggugcacuguguugccaccccuucugaccgacgagaugaucgcucaguauaccagugccuugcuggca
gggaccauaacuagcggauggacuuucggugcaggagcugcucugcaaaucccuuuugcgaugcaaauggccuacaggu
uuaaugguauaggaguuacucagaauguccuguacgaaaaucaaaagcugaucgccaaucaauucaacagugcuauugg
gaaaauacaggacaguuugaguucaacagcgagcgcucucggcaaacugcaggauguugugaaucaaaacgcgcaagcuu
ugaacacucuugugaagcagcuuucauccaacuucggagcgaucucauccguccugaacgacauauugucaagacuugac
ccaccugaagcggaaguucagauagaccgacucauaacgggccgacuucaguccuugcagacauacgugacccaacaacu
uauccgcgcagccgaaauaagggcuucagcuaaccuugcagcaaccaaaaugucagagugcgugcucggucaaagcaagc
ggguagacuuuuguggcaagggguaucaucuuauguccuuuccucaauccgccccucacgggguggucuucuugcacu
gcacuuauguaccugcucaagagaagaauuuuacgaccgccccugcgaucugucacgacgggaaagcacauuucccccgc
gagggagucuuugugucuaaugguacucauugguuuguuacgcagcggaacuuuuacgaaccucaaauaauuacaacgg
auaauacagauguuagugggaauugcgacguggugaucgguauagucaacaauacgguguaugauccacuucaaccaga
acuugauuccuuuaaggaagagcuggacaaauauuucaagaaccauacauccccugacguggaccuuggcgauauaagcg
gcauuaaugcuucaguggucaauauacaaaaggaaaucgaucgccugaaugaggucgcaaagaauuugaaugagucccu
gaucgaccugcaagagcucgggaaauaugagcaguacaucaaguggcccuggucagguagacguaggcggcgccggggc
aguggcggcucagggagcgguuauauacccgaagccccuagagaugggcaagcuuauguccgaaaggacggcgaauggg
ugcuccuuuccacuuucuugggauaauag (SEQ ID NO: 138)
MDWTWILFLVAAATRVHSMFVFLVLLPLVSSQCVNLTTRTQLPPAYTNSFTRGVYY
PDKVFRSSCLHSTQDLFLPFFSNVTWFHAIHVSGTNGTKRFDNPVLPFNDGVYFASTE
KSGIIRGWIFGTTLDSKTQSLLIVNNATNVVIKVCEFQFCNDPFLGVYYHKNNKSWM
ESEFRVYSSANNCTFEYVSQPFLMDLEGKQGNFKNLREFVFKNIDGYFKIYSKHTPIN
LVRDLPQGFSALEPLVDLPIGINITRFQTLLALHRSYLTPGDSSSGWTAGAAAYYVGY
LQPRTFLLKYNENGTITDAVDCALDPLSETKCTLKSFTVEKGIYQTSNFRVQPTESIVR
FPNITNLCPFGEVFNATRFASVYAWNRKRISNCVADYSVLYNSASFSTFKCYGVNGT
KLNDLCFTNVYADSFVIRGDEVRQIAPGQTGKIADYNYKLPDDFTGCVIAWNSNNLD
SKVGGNYNYLYRLFRKSNLKPFERDINTTIYQAGSTPCNGVEGFNCYFPLQSYGFQPT
NGVGYQPYRVVVLSFELNHAPATVCGPKKSTNLVKNKCVNFNFNGLTGTGVLTESN
KKFLPFQQFGRDCAGTTDAVRDPQTLEILDITPCSFGGVSVITPGTNTSNQVAVLYQD
VNCTEVPVAIHAGQLTPTWRVYSTGSNVFQTRAGCLIGAEHVNNSYECDIPIGAGICA
SYQTQTNSPRRRRSVASQSIIAYTMSLCAENSVAYSNNSIAIPTNFTISCTTEILPVSMT
KTSCDCTMYICGDSTECSNLLLQYGSFCTQLNRALTGIAVEQDKNTQEVFAQVKQCY
KTPPIKDFGGFNFSQILPDPSRRRRSFIEDLLFNKVTLADAGFIKQYGDCLGDIAARDLI
CAQKFNGCTVLPPLLTDEMIAQYTSALLAGTITSGWTFGAGAALQIPFAMQMAYRFN
GIGVTQNVLYENQKLIANQFNSAIGKIQDSLSSTASALGKLQDVVNQNAQALNTLVK
QLSSNFGAISSVLNDILSRLDPPEAEVQIDRLITGRLQSLQTYVTQQLIRAAEIRASANL
AATKMSECVLGQSKRVDFCGKGYHLMSFPQSAPHGVVFLHCTYVPAQEKNFTTAPA
ICHDGKAHFPREGVFVSNGTHWFVTQRNFYEPQIITTDNTDVSGNCDVVIGIVNNTV
YDPLQPELDSFKEELDKYFKNHTSPDVDLGDISGINASVVNIQKEIDRLNEVAKNLNE
SLIDLQELGKYEQYIKWPWSGRRRRRRGSGGSGSGYIPEAPRDGQAYVRKDGEWVL
LSTFLG** (SEQ ID NO: 139)
WuS_3F_2P_Gly_pVax
ggatccgccaccatggattggacctggatacttttcctcgtggccgcagcaacaagagtccactccatgttcgtcttcttggtacttttgcc
actcgtcagttctcagtgcgttaacctgactactagaacccaattgcccccggcatacacaaactctttcacccggggtgtctactatccc
gacaaagtgtttagaagtagcgtgctgcacagcacccaagatctctttctgccattcttctcaaacgtcacctggtttcacgccatccatgt
aagcgggaccaacggcacaaagcgttttgataaccctgttttgccattcaatgatggcgtgtattttgcttccactgagaaaagcaacatc
attagagggtggatatttggcacaacgcttgactccaagacgcagagtcttttgatagtaaacaacgcaactaatgtggtcattaaagtct
gtgaatttcaattttgcaatgaccccttccttggagtctattaccacaagaacaacaaaagctggatggaaagcgaatttagggtctacag
ctctgccaataactgcacattcgaatacgtcagccaaccattcttgatggacctggaaggcaagcaaggaaactttaagaatctgaggg
aatttgtgtttaagaatatcgacggatattttaagatctattccaagcatactcccattaatctcgttcgtgaccttcctcagggtttctctgcat
tggaacccctcgtagatttgcccattgggattaatatcactagattccagacgctgcttgcactccatcgatcttatctgacccctggtgac
tcctcttccgggtggacggcgggtgctgcagcctactacgttggctatttgcaacctaggacctttctgttgaagtataatgagaatggga
ctattactgatgccgttgattgcgccctcgatccgctgtcagaaacaaagtgcaccctgaagagcttcacagtagaaaagggaatctatc
aaacctcaaatttccgcgttcaaccaactgaatcaatcgtgcgttttcctaacatcacaaatctgtgtccgtttggagaagtatttaatgcga
cgcgtttcgcaagcgtctacgcgtggaatcgcaaacgtatctctaattgcgtagcagattattctgtgctgtacaatagcgcatctttctca
acgtttaagtgctacggcgttaatgggaccaagctgaatgatctctgtttcactaatgtgtacgcagacagttttgtaattagaggagacg
aggttaggcaaatagcaccgggtcaaactggcaaaatcgccgactataactacaagctccctgatgacttcacgggctgcgtaattgct
tggaactctaataacctggactctaaagtcggcgggaattataattatctctatcggttgtttcgaaaatccaatctcaaaccctttgagcg
ggacatcaatactacaatttatcaagctggtagtactccttgcaatggggtagaaggcttcaattgttatttcccccttcaatcttacggattt
caacccacgaacggcgtagggtaccagccctatcgagtggtggtactgtcattcgaacttaatcacgccccagcaacagtctgcggg
cctaagaaaagcacgaatcttgtcaagaataagtgtgtaaatttcaacttcaatggtcttacaggcacgggagtgctcactgagtctaata
agaaatttcttcctttccaacaattcggtcgtgatattgccgatactactgatgcagtccgagatccacaaactctcgaaatcctcgatatta
ctccttgtagttttggcggcgtctccgtgatcaccccagggaccaacactagtaaccaagtggcggtgctctaccaagatgttaactgca
cagaagtcccggtagcgatccatgccgaccagctcactcccacatggcgtgtttacagcacagggtcaaacgttttccagacccgtgc
cggatgtcttataggagccgaacacgtaaataacagttatgaatgcgatatcccaattggtgcaggtatctgtgcgtcatatcaaaccca
aactaattctccgagacgacgacggagcgttgcctcacaatcaataatcgcctacacaatgtccctcggtgccgaaaattcagtcgctta
ctctaacaatagcattgctatccctaccaacttcactatttctgttaccacggaaattttgcctgtatccatgaccaaaacatctgttgattgc
acgatgtacatctgcggggattctaccgaatgttctaacctgcttctgcaatacggctccttctgcacccaattgaaccgcgcactgactg
ggattgctgtggaacaagacaagaatactcaagaagtatttgcccaggtcaaacagatttacaaaactcccccaattaaagatttcggc
ggtttcaattttagtcaaattctgccagatccaagtcgacgccgcaggagctttattgaggacctgctctttaataaagtcacgctggccg
acgccggcttcataaaacagtatggcgattgtcttggagacatcgccgcccgcgacctcatttgcgcacaaaagttcaatgggctcacc
gtgttgccaccactgctcacagatgagatgatcgcacagtacacgagcgcccttcttgccggcactatcacgtctggttggacgttcgg
tgccggagccgctctgcaaattccctttgcaatgcaaatggcctatagatttaatggaattggcgtaacacagaacgtgttgtacgagaa
ccagaagctcattgccaaccagttcaattccgctattggcaaaatacaagactctctcagctcaactgctagcgcactgggaaaattgca
agacgtagtcaatcaaaatgcccaagccctcaatactctcgtcaaacagttgtcttccaactttggggctatcagtagtgtactcaatgac
attctttcaagactggacccgcccgaggcggaagtccaaattgatcgtctgataactggaaggttgcaaagccttcagacctacgttac
gcaacaacttattagggctgccgaaataagggcatccgctaatctggcagctacaaagatgtctgaatgtgttttgggacagagcaaac
gggttgacttctgcggtaaaggttaccatctcatgtcttttccacaaagcgcaccgcacggagtcgtcttcctgcatgtaacatacgtccc
agcccaagaaaagaattttaccacagccccagccatctgccacgacggcaaggcgcatttcccaagggaaggcgtgtttgtatccaa
cgggacgcattggtttgtcactcaaaggaacttttacgaaccccaaattattaccactgataacaccttcgtttctgggaactgtgatgtcg
tgattgggatagtaaacaacacggtatatgatccactgcaaccagaactggattccttcaaagaagagctggacaaatacttcaagaat
catactagtcctgacgtcgacctgggcgatatcagtggaatcaacgctagcgtcgtaaacattcaaaaggagatcgatagacttaacga
ggtcgccaagaatctcaatgaaagcctcatcgatttgcaagaactcggaaaatatgagcaatacataaaatggccatggtctggcagg
agaagacgcaggagaggtagcggcggcagcggatcagggtacattccggaagcccccagggacggacaggcatatgtccgcaa
ggacggagaatgggttcttcttagcacttttctggggtaataa (SEQ ID NO: 140)
ggauccgccaccauggauuggaccuggauacuuuuccucguggccgcagcaacaagaguccacuccauguucgucuucu
ugguacuuuugccacucgucaguucucagugcguuaaccugacuacuagaacccaauugcccccggcauacacaaacucu
uucacccggggugucuacuaucccgacaaaguguuuagaaguagcgugcugcacagcacccaagaucucuuucugccau
ucuucucaaacgucaccugguuucacgccauccauguaagcgggaccaacggcacaaagcguuuugauaacccuguuuu
gccauucaaugauggcguguauuuugcuuccacugagaaaagcaacaucauuagaggguggauauuuggcacaacgcuu
gacuccaagacgcagagucuuuugauaguaaacaacgcaacuaauguggucauuaaagucugugaauuucaauuuugca
augaccccuuccuuggagucuauuaccacaagaacaacaaaagcuggauggaaagcgaauuuagggucuacagcucugcc
aauaacugcacauucgaauacgucagccaaccauucuugauggaccuggaaggcaagcaaggaaacuuuaagaaucugag
ggaauuuguguuuaagaauaucgacggauauuuuaagaucuauuccaagcauacucccauuaaucucguucgugaccuu
ccucaggguuucucugcauuggaaccccucguagauuugcccauugggauuaauaucacuagauuccagacgcugcuug
cacuccaucgaucuuaucugaccccuggugacuccucuuccggguggacggcgggugcugcagccuacuacguuggcua
uuugcaaccuaggaccuuucuguugaaguauaaugagaaugggacuauuacugaugccguugauugcgcccucgauccg
cugucagaaacaaagugcacccugaagagcuucacaguagaaaagggaaucuaucaaaccucaaauuuccgcguucaacc
aacugaaucaaucgugcguuuuccuaacaucacaaaucuguguccguuuggagaaguauuuaaugcgacgcguuucgca
agcgucuacgcguggaaucgcaaacguaucucuaauugcguagcagauuauucugugcuguacaauagcgcaucuuucu
caacguuuaagugcuacggcguuaaugggaccaagcugaaugaucucuguuucacuaauguguacgcagacaguuuugu
aauuagaggagacgagguuaggcaaauagcaccgggucaaacuggcaaaaucgccgacuauaacuacaagcucccugaug
acuucacgggcugcguaauugcuuggaacucuaauaaccuggacucuaaagucggcgggaauuauaauuaucucuaucg
guuguuucgaaaauccaaucucaaacccuuugagcgggacaucaauacuacaauuuaucaagcugguaguacuccuugca
augggguagaaggcuucaauuguuauuucccccuucaaucuuacggauuucaacccacgaacggcguaggguaccagcc
cuaucgaguggugguacugucauucgaacuuaaucacgccccagcaacagucugcgggccuaagaaaagcacgaaucuug
ucaagaauaaguguguaaauuucaacuucaauggucuuacaggcacgggagugcucacugagucuaauaagaaauuucu
uccuuuccaacaauucggucgugauauugccgauacuacugaugcaguccgagauccacaaacucucgaaauccucgaua
uuacuccuuguaguuuuggcggcgucuccgugaucaccccagggaccaacacuaguaaccaaguggcggugcucuacca
agauguuaacugcacagaagucccgguagcgauccaugccgaccagcucacucccacauggcguguuuacagcacagggu
caaacguuuuccagacccgugccggaugucuuauaggagccgaacacguaaauaacaguuaugaaugcgauaucccaauu
ggugcagguaucugugcgucauaucaaacccaaacuaauucuccgagacgacgacggagcguugccucacaaucaauaau
cgccuacacaaugucccucggugccgaaaauucagucgcuuacucuaacaauagcauugcuaucccuaccaacuucacua
uuucuguuaccacggaaauuuugccuguauccaugaccaaaacaucuguugauugcacgauguacaucugcggggauuc
uaccgaauguucuaaccugcuucugcaauacggcuccuucugcacccaauugaaccgcgcacugacugggauugcugug
gaacaagacaagaauacucaagaaguauuugcccaggucaaacagauuuacaaaacucccccaauuaaagauuucggcgg
uuucaauuuuagucaaauucugccagauccaagucgacgccgcaggagcuuuauugaggaccugcucuuuaauaaaguc
acgcuggccgacgccggcuucauaaaacaguauggcgauugucuuggagacaucgccgcccgcgaccucauuugcgcaca
aaaguucaaugggcucaccguguugccaccacugcucacagaugagaugaucgcacaguacacgagcgcccuucuugccg
gcacuaucacgucugguuggacguucggugccggagccgcucugcaaauucccuuugcaaugcaaauggccuauagauu
uaauggaauuggcguaacacagaacguguuguacgagaaccagaagcucauugccaaccaguucaauuccgcuauuggca
aaauacaagacucucucagcucaacugcuagcgcacugggaaaauugcaagacguagucaaucaaaaugcccaagcccuca
auacucucgucaaacaguugucuuccaacuuuggggcuaucaguaguguacucaaugacauucuuucaagacuggaccc
gcccgaggcggaaguccaaauugaucgucugauaacuggaagguugcaaagccuucagaccuacguuacgcaacaacuua
uuagggcugccgaaauaagggcauccgcuaaucuggcagcuacaaagaugucugaauguguuuugggacagagcaaacg
gguugacuucugcgguaaagguuaccaucucaugucuuuuccacaaagcgcaccgcacggagucgucuuccugcaugua
acauacgucccagcccaagaaaagaauuuuaccacagccccagccaucugccacgacggcaaggcgcauuucccaagggaa
ggcguguuuguauccaacgggacgcauugguuugucacucaaaggaacuuuuacgaaccccaaauuauuaccacugaua
acaccuucguuucugggaacugugaugucgugauugggauaguaaacaacacgguauaugauccacugcaaccagaacu
ggauuccuucaaagaagagcuggacaaauacuucaagaaucauacuaguccugacgucgaccugggcgauaucaguggaa
ucaacgcuagcgucguaaacauucaaaaggagaucgauagacuuaacgaggucgccaagaaucucaaugaaagccucauc
gauuugcaagaacucggaaaauaugagcaauacauaaaauggccauggucuggcaggagaagacgcaggagagguagcg
gcggcagcggaucaggguacauuccggaagcccccagggacggacaggcauauguccgcaaggacggagaauggguucu
ucuuagcacuuuucugggguaauaa (SEQ ID NO: 141)
MDWTWILFLVAAATRVHSMFVFLVLLPLVSSQCVNLTTRTQLPPAYTNSFTRGVYY
PDKVFRSSVLHSTQDLFLPFFSNVTWFHAIHVSGTNGTKRFDNPVLPFNDGVYFASTE
KSNIIRGWIFGTTLDSKTQSLLIVNNATNVVIKVCEFQFCNDPFLGVYYHKNNKSWM
ESEFRVYSSANNCTFEYVSQPFLMDLEGKQGNFKNLREFVFKNIDGYFKIYSKHTPIN
LVRDLPQGFSALEPLVDLPIGINITRFQTLLALHRSYLTPGDSSSGWTAGAAAYYVGY
LQPRTFLLKYNENGTITDAVDCALDPLSETKCTLKSFTVEKGIYQTSNFRVQPTESIVR
FPNITNLCPFGEVFNATRFASVYAWNRKRISNCVADYSVLYNSASFSTFKCYGVNGT
KLNDLCFTNVYADSFVIRGDEVRQIAPGQTGKIADYNYKLPDDFTGCVIAWNSNNLD
SKVGGNYNYLYRLFRKSNLKPFERDINTTIYQAGSTPCNGVEGFNCYFPLQSYGFQPT
NGVGYQPYRVVVLSFELNHAPATVCGPKKSTNLVKNKCVNFNFNGLTGTGVLTESN
KKFLPFQQFGRDIADTTDAVRDPQTLEILDITPCSFGGVSVITPGTNTSNQVAVLYQD
VNCTEVPVAIHADQLTPTWRVYSTGSNVFQTRAGCLIGAEHVNNSYECDIPIGAGICA
SYQTQTNSPRRRRSVASQSIIAYTMSLGAENSVAYSNNSIAIPTNFTISVTTEILPVSMT
KTSVDCTMYICGDSTECSNLLLQYGSFCTQLNRALTGIAVEQDKNTQEVFAQVKQIY
KTPPIKDFGGFNFSQILPDPSRRRRSFIEDLLFNKVTLADAGFIKQYGDCLGDIAARDLI
CAQKFNGLTVLPPLLTDEMIAQYTSALLAGTITSGWTFGAGAALQIPFAMQMAYRFN
GIGVTQNVLYENQKLIANQFNSAIGKIQDSLSSTASALGKLQDVVNQNAQALNTLVK
QLSSNFGAISSVLNDILSRLDPPEAEVQIDRLITGRLQSLQTYVTQQLIRAAEIRASANL
AATKMSECVLGQSKRVDFCGKGYHLMSFPQSAPHGVVFLHVTYVPAQEKNFTTAPA
ICHDGKAHFPREGVFVSNGTHWFVTQRNFYEPQIITTDNTFVSGNCDVVIGIVNNTVY
DPLQPELDSFKEELDKYFKNHTSPDVDLGDISGINASVVNIQKEIDRLNEVAKNLNES
LIDLQELGKYEQYIKWPWSGRRRRRRGSGGSGSGYIPEAPRDGQAYVRKDGEWVLL
STFLG** (SEQ ID NO: 142)
WuS_3F_2P_NoClev_pVax
ggatccgccaccatggattggacgtggattctgtttctggtggccgcagcgacaagggtgcattcaatgtttgtgttcctggtcctgctgc
cactggtctcatcacagtgtgtaaacctgactacaagaacgcagcttccgcctgcctacacgaacagcttcaccaggggagtgtattat
cctgacaaagtctttaggagctctgttctccactccactcaagacctgtttctgcccttcttcagtaacgtgacttggtttcacgcaatacat
gtctccggcacaaatggaaccaaaagattcgataaccctgttctcccattcaatgatggagtatattttgctagcactgaaaagtctaacat
tattagaggctggatatttggcacgacattggactccaagacgcaaagtctcttgattgtgaacaacgcaacaaacgtggtgataaaagt
ttgcgaattccaattttgcaatgacccattcctgggagtttactaccacaagaataacaaaagctggatggaatccgagttccgggtttact
cctctgctaacaactgtacctttgagtatgtgagtcaaccattccttatggatctcgaaggaaaacaaggtaacttcaagaacctgaggg
agtttgtgtttaagaatatcgatggctattttaagatttatagcaaacacactccgattaatctggtgagagatctcccgcaaggattttctgc
tttggagccattggttgacttgcctattggaatcaacatcacccgttttcaaactctgcttgcgctgcatagatcctaccttacgcctggcga
ttcaagcagtggctggaccgcgggagcggccgcctattatgtaggctacttgcagcctcgcacctttctcctcaagtacaatgaaaacg
gcacaattacagacgcagtggattgtgctctggaccccctcagtgaaactaaatgtaccctgaaaagcttcactgttgagaaaggcatat
atcaaacctcaaactttagagtgcaacctactgaaagcattgtaagattccctaacattacaaacctgtgcccctttggcgaagtctttaat
gcaacccggtttgctagcgtgtatgcttggaaccgcaagaggatatccaattgcgtcgcagattattccgtcctgtataactctgccagct
ttagtaccttcaaatgttatggggtatctcccacaaaactcaatgatctttgtttcacaaatgtctatgctgactcctttgttatcagagggga
cgaagttcgccaaattgctccaggtcaaacaggaaagattgcagattataactacaagcttcccgacgattttacaggttgtgtgatagct
tggaactccaataatctggattccaaggtaggcgggaactacaattatctctacaggctcttccggaaatccaatctcaagccgttcgaa
agggatataagcactgagatctatcaagcaggcagtacaccctgtaacggagtagagggcttcaactgctactttccactgcaatcctat
gggtttcaaccgactaacggtgtcgggtaccaaccctatcgtgtcgtggtcctgtcctttgagcttctgcacgctcctgctaccgtttgcg
gccccaagaaaagcacgaatttggtcaagaacaaatgtgtcaactttaacttcaacggattgacagggaccggagtattgaccgaatct
aataagaaatttctgcccttccaacaattcggacgggacatagcagacacaaccgatgctgtcagggacccacagacacttgaaatac
tcgatatcaccccatgcagctttggcggagtctcagtcattacgcctggcaccaatacttccaatcaagttgcagtgctctatcaggatgt
caattgtactgaggtccccgtcgccatccacgcggatcaacttacccccacatggcgagtatatagtaccgggagcaacgtctttcaaa
cccgagcaggatgtctgataggtgccgaacacgtaaacaacagctacgaatgtgatatcccgatcggcgcagggatttgcgctagct
accaaacccaaactaattctccgcgccgccgcaggtccgtagcaagtcaatcaataatagcatacaccatgtcattgggagctgaaaa
cagcgtggcatatagcaacaattccatagctatccctacaaatttcacgatttctgttaccaccgaaattctgccagtgagcatgaccaaa
acctcagtggattgtacgatgtacatatgcggcgattccacggaatgttccaatctccttttgcaatacggcagcttttgtacccaactgaa
tagagctctgacgggtatagcagtagagcaggataagaacactcaagaggtgtttgcccaggtcaaacaaatttacaagactccccca
ataaaagactttggcggcttcaatttcagccaaatcttgccagacccttccaggcggcggcgctcatttatcgaagatttgcttttcaataa
agtcaccctggccgacgccggatttattaaacaatacggcgattgtctgggcgacatcgccgcaagggacctcatctgtgcgcaaaag
ttcaatggcctgacggtgcttccaccactcctgactgatgagatgattgcccaatacacatctgccctgctggctggtacaataacgagt
gggtggacctttggggctggagcagcattgcaaattccattcgccatgcaaatggcatatcgttttaacggcattggagtgactcaaaat
gtgctgtatgaaaaccaaaagcttattgcaaatcagtttaattccgccattggcaaaatccaggatagcctcagtagtacagcaagcgcc
ttggggaaactgcaagatgtggttaatcaaaatgcacaagctctcaataccctggtcaagcaacttagtagtaactttggtgccatcagc
agcgttctcaacgacatcctgagtcgtcttgatcccccagaggcagaggttcaaattgaccggcttatcactggaaggcttcaatccctg
caaacttacgtgactcagcaactgatacgcgctgcagaaattcgggcctcagcaaaccttgccgcgacaaagatgagcgaatgcgtg
ctgggacaatccaagcgggtcgacttttgtggtaaaggctatcatctgatgagcttcccacagtccgctccacacggcgtcgttttcctg
cacgtgacctatgtgccagcacaggagaagaactttacaacagccccggctatctgccacgatggcaaagctcactttcctagagagg
gagtgtttgtaagcaatggaacccattggttcgttacacaaagaaacttttatgagccgcaaattatcacaacagataatacattcgtctcc
gggaactgtgacgttgtgatagggattgtcaacaacacagtgtacgaccccctgcaacccgagctggattcatttaaagaagaactcg
acaagtacttcaagaatcatactagtccagatgtggatctgggcgatatatcaggaatcaatgccagcgtggtcaatattcaaaaggag
attgatagactgaacgaggttgccaagaatctgaatgaaagcctgatcgatctgcaagaattgggcaagtatgagcagtacattaaatg
gccctggtctggcgggagcggcggatctgggtctggatatattcccgaagctcctagagatggacaagcttacgtccgtaaagacgg
cgagtgggttcttctctccacattcctcggctgatga (SEQ ID NO: 143)
ggauccgccaccauggauuggacguggauucuguuucugguggccgcagcgacaagggugcauucaauguuuguguuc
cugguccugcugccacuggucucaucacaguguguaaaccugacuacaagaacgcagcuuccgccugccuacacgaacag
cuucaccaggggaguguauuauccugacaaagucuuuaggagcucuguucuccacuccacucaagaccuguuucugccc
uucuucaguaacgugacuugguuucacgcaauacaugucuccggcacaaauggaaccaaaagauucgauaacccuguucu
cccauucaaugauggaguauauuuugcuagcacugaaaagucuaacauuauuagaggcuggauauuuggcacgacauug
gacuccaagacgcaaagucucuugauugugaacaacgcaacaaacguggugauaaaaguuugcgaauuccaauuuugcaa
ugacccauuccugggaguuuacuaccacaagaauaacaaaagcuggauggaauccgaguuccggguuuacuccucugcu
aacaacuguaccuuugaguaugugagucaaccauuccuuauggaucucgaaggaaaacaagguaacuucaagaaccugag
ggaguuuguguuuaagaauaucgauggcuauuuuaagauuuauagcaaacacacuccgauuaaucuggugagagaucuc
ccgcaaggauuuucugcuuuggagccauugguugacuugccuauuggaaucaacaucacccguuuucaaacucugcuug
cgcugcauagauccuaccuuacgccuggcgauucaagcaguggcuggaccgcgggagcggccgccuauuauguaggcua
cuugcagccucgcaccuuucuccucaaguacaaugaaaacggcacaauuacagacgcaguggauugugcucuggaccccc
ucagugaaacuaaauguacccugaaaagcuucacuguugagaaaggcauauaucaaaccucaaacuuuagagugcaaccu
acugaaagcauuguaagauucccuaacauuacaaaccugugccccuuuggcgaagucuuuaaugcaacccgguuugcua
gcguguaugcuuggaaccgcaagaggauauccaauugcgucgcagauuauuccguccuguauaacucugccagcuuuag
uaccuucaaauguuaugggguaucucccacaaaacucaaugaucuuuguuucacaaaugucuaugcugacuccuuuguu
aucagaggggacgaaguucgccaaauugcuccaggucaaacaggaaagauugcagauuauaacuacaagcuucccgacga
uuuuacagguugugugauagcuuggaacuccaauaaucuggauuccaagguaggcgggaacuacaauuaucucuacagg
cucuuccggaaauccaaucucaagccguucgaaagggauauaagcacugagaucuaucaagcaggcaguacacccuguaa
cggaguagagggcuucaacugcuacuuuccacugcaauccuauggguuucaaccgacuaacggugucggguaccaaccc
uaucgugucgugguccuguccuuugagcuucugcacgcuccugcuaccguuugcggccccaagaaaagcacgaauuugg
ucaagaacaaaugugucaacuuuaacuucaacggauugacagggaccggaguauugaccgaaucuaauaagaaauuucug
cccuuccaacaauucggacgggacauagcagacacaaccgaugcugucagggacccacagacacuugaaauacucgauau
caccccaugcagcuuuggcggagucucagucauuacgccuggcaccaauacuuccaaucaaguugcagugcucuaucagg
augucaauuguacugagguccccgucgccauccacgcggaucaacuuacccccacauggcgaguauauaguaccgggagc
aacgucuuucaaacccgagcaggaugucugauaggugccgaacacguaaacaacagcuacgaaugugauaucccgaucgg
cgcagggauuugcgcuagcuaccaaacccaaacuaauucuccgcgccgccgcagguccguagcaagucaaucaauaauag
cauacaccaugucauugggagcugaaaacagcguggcauauagcaacaauuccauagcuaucccuacaaauuucacgauu
ucuguuaccaccgaaauucugccagugagcaugaccaaaaccucaguggauuguacgauguacauaugcggcgauuccac
ggaauguuccaaucuccuuuugcaauacggcagcuuuuguacccaacugaauagagcucugacggguauagcaguagag
caggauaagaacacucaagagguguuugcccaggucaaacaaauuuacaagacucccccaauaaaagacuuuggcggcuu
caauuucagccaaaucuugccagacccuuccaggcggcggcgcucauuuaucgaagauuugcuuuucaauaaagucaccc
uggccgacgccggauuuauuaaacaauacggcgauugucugggcgacaucgccgcaagggaccucaucugugcgcaaaa
guucaauggccugacggugcuuccaccacuccugacugaugagaugauugcccaauacacaucugcccugcuggcuggu
acaauaacgaguggguggaccuuuggggcuggagcagcauugcaaauuccauucgccaugcaaauggcauaucguuuua
acggcauuggagugacucaaaaugugcuguaugaaaaccaaaagcuuauugcaaaucaguuuaauuccgccauuggcaaa
auccaggauagccucaguaguacagcaagcgccuuggggaaacugcaagaugugguuaaucaaaaugcacaagcucucaa
uacccuggucaagcaacuuaguaguaacuuuggugccaucagcagcguucucaacgacauccugagucgucuugauccc
ccagaggcagagguucaaauugaccggcuuaucacuggaaggcuucaaucccugcaaacuuacgugacucagcaacugau
acgcgcugcagaaauucgggccucagcaaaccuugccgcgacaaagaugagcgaaugcgugcugggacaauccaagcggg
ucgacuuuugugguaaaggcuaucaucugaugagcuucccacaguccgcuccacacggcgucguuuuccugcacgugac
cuaugugccagcacaggagaagaacuuuacaacagccccggcuaucugccacgauggcaaagcucacuuuccuagagagg
gaguguuuguaagcaauggaacccauugguucguuacacaaagaaacuuuuaugagccgcaaauuaucacaacagauaau
acauucgucuccgggaacugugacguugugauagggauugucaacaacacaguguacgacccccugcaacccgagcugg
auucauuuaaagaagaacucgacaaguacuucaagaaucauacuaguccagauguggaucugggcgauauaucaggaauc
aaugccagcguggucaauauucaaaaggagauugauagacugaacgagguugccaagaaucugaaugaaagccugaucg
aucugcaagaauugggcaaguaugagcaguacauuaaauggcccuggucuggcgggagcggcggaucugggucuggau
auauucccgaagcuccuagagauggacaagcuuacguccguaaagacggcgaguggguucuucucuccacauuccucgg
cugauga (SEQ ID NO: 144)
MDWTWILFLVAAATRVHSMFVFLVLLPLVSSQCVNLTTRTQLPPAYTNSFTRGVYY
PDKVFRSSVLHSTQDLFLPFFSNVTWFHAIHVSGTNGTKRFDNPVLPFNDGVYFASTE
KSNIIRGWIFGTTLDSKTQSLLIVNNATNVVIKVCEFQFCNDPFLGVYYHKNNKSWM
ESEFRVYSSANNCTFEYVSQPFLMDLEGKQGNFKNLREFVFKNIDGYFKIYSKHTPIN
LVRDLPQGFSALEPLVDLPIGINITRFQTLLALHRSYLTPGDSSSGWTAGAAAYYVGY
LQPRTFLLKYNENGTITDAVDCALDPLSETKCTLKSFTVEKGIYQTSNFRVQPTESIVR
FPNITNLCPFGEVFNATRFASVYAWNRKRISNCVADYSVLYNSASFSTFKCYGVSPTK
LNDLCFTNVYADSFVIRGDEVRQIAPGQTGKIADYNYKLPDDFTGCVIAWNSNNLDS
KVGGNYNYLYRLFRKSNLKPFERDISTEIYQAGSTPCNGVEGFNCYFPLQSYGFQPTN
GVGYQPYRVVVLSFELLHAPATVCGPKKSTNLVKNKCVNFNFNGLTGTGVLTESNK
KFLPFQQFGRDIADTTDAVRDPQTLEILDITPCSFGGVSVITPGTNTSNQVAVLYQDV
NCTEVPVAIHADQLTPTWRVYSTGSNVFQTRAGCLIGAEHVNNSYECDIPIGAGICAS
YQTQTNSPRRRRSVASQSIIAYTMSLGAENSVAYSNNSIAIPTNFTISVTTEILPVSMTK
TSVDCTMYICGDSTECSNLLLQYGSFCTQLNRALTGIAVEQDKNTQEVFAQVKQIYK
TPPIKDFGGFNFSQILPDPSRRRRSFIEDLLFNKVTLADAGFIKQYGDCLGDIAARDLIC
AQKFNGLTVLPPLLTDEMIAQYTSALLAGTITSGWTFGAGAALQIPFAMQMAYRFNG
IGVTQNVLYENQKLIANQFNSAIGKIQDSLSSTASALGKLQDVVNQNAQALNTLVKQ
LSSNFGAISSVLNDILSRLDPPEAEVQIDRLITGRLQSLQTYVTQQLIRAAEIRASANLA
ATKMSECVLGQSKRVDFCGKGYHLMSFPQSAPHGVVFLHVTYVPAQEKNFTTAPAI
CHDGKAHFPREGVFVSNGTHWFVTQRNFYEPQIITTDNTFVSGNCDVVIGIVNNTVY
DPLQPELDSFKEELDKYFKNHTSPDVDLGDISGINASVVNIQKEIDRLNEVAKNLNES
LIDLQELGKYEQYIKWPWSGGSGGSGSGYIPEAPRDGQAYVRKDGEWVLLSTFLG**
(SEQ ID NO: 145)
WuS_3F_2P_pVax
ggatccgccaccatggattggacctggattctctttcttgtggcggcggcaacacgcgtccacagcatgttcgtctttctggtattgctgc
cgcttgtgagtagccagtgtgtgaacttgactaccaggacccagctcccaccggcttataccaattccttcacaagaggtgtctactatc
cagataaagttttccgcagctcagtgttgcatagcacacaggatctctttctgccattcttcagcaacgtcacgtggtttcatgcgatacac
gttagtggaacaaacggaacaaaacgcttcgacaaccctgttctgccattcaatgacggagtttactttgcgagtaccgagaaatctaac
atcattagagggtggatctttgggactacattggattctaaaacccagtcactcctcatagtcaataacgctacaaatgtggtgattaaggt
atgcgaatttcagttttgcaacgacccatttctcggtgtatattatcacaagaataataaaagttggatggagtccgagttccgcgtctattc
atcagccaataattgtactttcgaatatgtttctcaaccgtttctcatggatctcgaaggaaagcaagggaattttaagaatctccgggagtt
tgtcttcaagaacatagatggctattttaaaatttactcaaagcatactcctattaacctcgttcgggatctcccccagggttttagcgccct
ggagccactggttgatctgccaattgggattaatatcacacgctttcaaactctcctggcccttcacagatcttacttgaccccaggtgatt
caagtagtggttggacagctggagctgctgcatattatgtaggttatctccaaccccgcacctttctcctcaaatataacgagaacggca
ccattacagatgcggtggactgtgccttggaccctctttctgagaccaagtgcacactcaaaagcttcactgtcgaaaaggggatttacc
agacatcaaattttagagttcaacccaccgaaagcattgtgagatttcctaacattacaaacttgtgcccatttggggaagtctttaacgct
acacgctttgctagcgtctatgcttggaaccgaaaacggattagtaactgcgtagctgattattccgtcttgtacaacagcgcatcttttag
cactttcaagtgttatggagtaagcccaacaaagctcaacgacctttgttttactaacgtctatgctgattcattcgtgattcgtggggatga
ggttcgtcagatcgccccaggccaaaccgggaaaatcgctgattataattataaattgcctgacgattttaccggctgtgtaatcgcctg
gaattccaacaatcttgattccaaggttggcggcaactacaactatctctaccgtctgtttcgcaaatccaatctcaagcccttcgaacgc
gatatttcaactgaaatctatcaggcagggtccactccgtgtaacggcgtagaaggatttaattgttacttcccattgcaaagttatggcttt
caacccaccaacggagtcgggtaccaaccatacagagtcgtcgtgctctcatttgagctccttcatgcacctgccacggtgtgcggcc
caaagaaatcaacgaaccttgtgaagaataaatgtgtcaattttaactttaatggcctgacagggactggcgtcctcacagaatctaataa
gaagtttctccctttccagcaatttggtcgcgatatagctgataccacagatgcagttagagacccacagacacttgagattctcgatatta
ccccgtgctcctttggcggcgtgtccgtcattactcccggtaccaatacgtctaaccaggtagcagtgctctaccaagatgtaaattgtac
tgaggtacccgtggcaatccatgccgaccaactgactccaacgtggcgggtttattcaaccggaagcaacgtgtttcaaacacgggct
ggctgccttataggcgctgagcacgtgaataatagttacgagtgtgatatcccgatcggagccggcatctgtgcatcttatcaaacacaa
acaaactccccgcgccggcggagaagcgtggctagccaaagtataatcgcttatacaatgtccttgggcgcggaaaattcagtggctt
attccaataattcaattgccattcctaccaactttacaattagcgtgaccacagaaatcttgcctgtgtctatgaccaagaccagcgtcgatt
gcaccatgtatatctgtggagatagcaccgagtgttcaaatttgctcctgcaatacggttccttttgtacacagcttaaccgcgccctcaca
ggtattgctgttgaacaagacaagaatactcaagaggtatttgctcaggtaaaacaaatttataagaccccaccgataaaagattttggc
ggtttcaatttctcccaaatattgccagatcctagtaggcgtcgtagatcatttatcgaggatctcctgttcaataaagtaaccctcgccgac
gctggtttcatcaaacaatatggcgactgcctgggagatattgcagctagggatttgatttgtgcacagaagttcaatggactcaccgttc
tcccgcctctcctgacagatgagatgattgcacaatacacctctgctcttttggccgggaccattacgagcggttggacttttggcgcgg
gtgcggctctccaaattcctttcgcgatgcaaatggcgtatagatttaatggaattggcgttactcaaaacgtcttgtacgagaatcagaa
actgatcgccaaccaatttaacagtgcaattggcaaaatccaagatagccttagttctactgcttcagcattgggtaagttgcaagatgtg
gtcaaccaaaacgcacaagcactcaataccctcgtgaagcaattgtccagcaattttggagctatctcaagtgtgctcaacgacatccttt
ctaggcttgatccacccgaggcagaggttcaaatcgacagactgataactggcaggctccaatctctgcaaacgtacgtgacacagca
actgattagggctgctgagatcagggcgtccgcgaatttggcagcaaccaaaatgagcgaatgcgtgctgggacaatcaaagagagt
tgatttctgtggaaagggttaccatctcatgtccttccctcaatcagctccccatggagttgtgtttctgcacgttacttacgtgccggcaca
agaaaagaatttcaccactgcaccggctatatgtcatgatgggaaagcccacttcccgcgggaaggcgttttcgtgtccaacgggact
cattggttcgtcacacaaaggaacttctatgagccacaaataattacaacagacaacacctttgtctctgggaactgcgatgtcgtgattg
gaatcgtgaacaacactgtctacgatccgctgcaacccgaactcgactcattcaaagaggaactggataagtatttcaagaaccatacc
agccccgatgtcgatctgggcgatatctccgggataaatgcttcagtagtaaacattcaaaaggaaatcgaccggctgaacgaggttg
cgaagaatcttaatgagtcattgatcgacctgcaagaacttggtaagtatgagcagtacatcaagtggccttggtcaggccgcaggcgt
cggcgtcgtgggagcggcggcagtgggagcggatatattccagaagcgccccgagacggacaagcttacgtacgaaaagacgga
gaatgggtactgctttccacttttcttggctaatga (SEQ ID NO: 146)
ggauccgccaccauggauuggaccuggauucucuuucuuguggcggcggcaacacgcguccacagcauguucgucuuuc
ugguauugcugccgcuugugaguagccagugugugaacuugacuaccaggacccagcucccaccggcuuauaccaauuc
cuucacaagaggugucuacuauccagauaaaguuuuccgcagcucaguguugcauagcacacaggaucucuuucugcca
uucuucagcaacgucacgugguuucaugcgauacacguuaguggaacaaacggaacaaaacgcuucgacaacccuguucu
gccauucaaugacggaguuuacuuugcgaguaccgagaaaucuaacaucauuagaggguggaucuuugggacuacauug
gauucuaaaacccagucacuccucauagucaauaacgcuacaaauguggugauuaagguaugcgaauuucaguuuugca
acgacccauuucucgguguauauuaucacaagaauaauaaaaguuggauggaguccgaguuccgcgucuauucaucagc
caauaauuguacuuucgaauauguuucucaaccguuucucauggaucucgaaggaaagcaagggaauuuuaagaaucuc
cgggaguuugucuucaagaacauagauggcuauuuuaaaauuuacucaaagcauacuccuauuaaccucguucgggauc
ucccccaggguuuuagcgcccuggagccacugguugaucugccaauugggauuaauaucacacgcuuucaaacucuccu
ggcccuucacagaucuuacuugaccccaggugauucaaguagugguuggacagcuggagcugcugcauauuauguaggu
uaucuccaaccccgcaccuuucuccucaaauauaacgagaacggcaccauuacagaugcgguggacugugccuuggaccc
ucuuucugagaccaagugcacacucaaaagcuucacugucgaaaaggggauuuaccagacaucaaauuuuagaguucaac
ccaccgaaagcauugugagauuuccuaacauuacaaacuugugcccauuuggggaagucuuuaacgcuacacgcuuugc
uagcgucuaugcuuggaaccgaaaacggauuaguaacugcguagcugauuauuccgucuuguacaacagcgcaucuuuu
agcacuuucaaguguuauggaguaagcccaacaaagcucaacgaccuuuguuuuacuaacgucuaugcugauucauucg
ugauucguggggaugagguucgucagaucgccccaggccaaaccgggaaaaucgcugauuauaauuauaaauugccuga
cgauuuuaccggcuguguaaucgccuggaauuccaacaaucuugauuccaagguuggcggcaacuacaacuaucucuac
cgucuguuucgcaaauccaaucucaagcccuucgaacgcgauauuucaacugaaaucuaucaggcaggguccacuccgug
uaacggcguagaaggauuuaauuguuacuucccauugcaaaguuauggcuuucaacccaccaacggagucggguaccaa
ccauacagagucgucgugcucucauuugagcuccuucaugcaccugccacggugugcggcccaaagaaaucaacgaaccu
ugugaagaauaaaugugucaauuuuaacuuuaauggccugacagggacuggcguccucacagaaucuaauaagaaguuu
cucccuuuccagcaauuuggucgcgauauagcugauaccacagaugcaguuagagacccacagacacuugagauucucga
uauuaccccgugcuccuuuggcggcguguccgucauuacucccgguaccaauacgucuaaccagguagcagugcucuac
caagauguaaauuguacugagguacccguggcaauccaugccgaccaacugacuccaacguggcggguuuauucaaccg
gaagcaacguguuucaaacacgggcuggcugccuuauaggcgcugagcacgugaauaauaguuacgagugugauauccc
gaucggagccggcaucugugcaucuuaucaaacacaaacaaacuccccgcgccggcggagaagcguggcuagccaaagua
uaaucgcuuauacaauguccuugggcgcggaaaauucaguggcuuauuccaauaauucaauugccauuccuaccaacuu
uacaauuagcgugaccacagaaaucuugccugugucuaugaccaagaccagcgucgauugcaccauguauaucugugga
gauagcaccgaguguucaaauuugcuccugcaauacgguuccuuuuguacacagcuuaaccgcgcccucacagguauug
cuguugaacaagacaagaauacucaagagguauuugcucagguaaaacaaauuuauaagaccccaccgauaaaagauuuu
ggcgguuucaauuucucccaaauauugccagauccuaguaggcgucguagaucauuuaucgaggaucuccuguucaaua
aaguaacccucgccgacgcugguuucaucaaacaauauggcgacugccugggagauauugcagcuagggauuugauuug
ugcacagaaguucaauggacucaccguucucccgccucuccugacagaugagaugauugcacaauacaccucugcucuuu
uggccgggaccauuacgagcgguuggacuuuuggcgcgggugcggcucuccaaauuccuuucgcgaugcaaauggcgu
auagauuuaauggaauuggcguuacucaaaacgucuuguacgagaaucagaaacugaucgccaaccaauuuaacagugca
auuggcaaaauccaagauagccuuaguucuacugcuucagcauuggguaaguugcaagauguggucaaccaaaacgcaca
agcacucaauacccucgugaagcaauuguccagcaauuuuggagcuaucucaagugugcucaacgacauccuuucuaggc
uugauccacccgaggcagagguucaaaucgacagacugauaacuggcaggcuccaaucucugcaaacguacgugacacag
caacugauuagggcugcugagaucagggcguccgcgaauuuggcagcaaccaaaaugagcgaaugcgugcugggacaau
caaagagaguugauuucuguggaaaggguuaccaucucauguccuucccucaaucagcuccccauggaguuguguuucu
gcacguuacuuacgugccggcacaagaaaagaauuucaccacugcaccggcuauaugucaugaugggaaagcccacuucc
cgcgggaaggcguuuucguguccaacgggacucauugguucgucacacaaaggaacuucuaugagccacaaauaauuac
aacagacaacaccuuugucucugggaacugcgaugucgugauuggaaucgugaacaacacugucuacgauccgcugcaac
ccgaacucgacucauucaaagaggaacuggauaaguauuucaagaaccauaccagccccgaugucgaucugggcgauauc
uccgggauaaaugcuucaguaguaaacauucaaaaggaaaucgaccggcugaacgagguugcgaagaaucuuaaugagu
cauugaucgaccugcaagaacuugguaaguaugagcaguacaucaaguggccuuggucaggccgcaggcgucggcgucg
ugggagcggcggcagugggagcggauauauuccagaagcgccccgagacggacaagcuuacguacgaaaagacggagaa
uggguacugcuuuccacuuuucuuggcuaauga (SEQ ID NO: 147)
MDWTWILFLVAAATRVHSMFVFLVLLPLVSSQCVNLTTRTQLPPAYTNSFTRGVYY
PDKVFRSSVLHSTQDLFLPFFSNVTWFHAIHVSGTNGTKRFDNPVLPFNDGVYFASTE
KSNIIRGWIFGTTLDSKTQSLLIVNNATNVVIKVCEFQFCNDPFLGVYYHKNNKSWM
ESEFRVYSSANNCTFEYVSQPFLMDLEGKQGNFKNLREFVFKNIDGYFKIYSKHTPIN
LVRDLPQGFSALEPLVDLPIGINITRFQTLLALHRSYLTPGDSSSGWTAGAAAYYVGY
LQPRTFLLKYNENGTITDAVDCALDPLSETKCTLKSFTVEKGIYQTSNFRVQPTESIVR
FPNITNLCPFGEVFNATRFASVYAWNRKRISNCVADYSVLYNSASFSTFKCYGVSPTK
LNDLCFTNVYADSFVIRGDEVRQIAPGQTGKIADYNYKLPDDFTGCVIAWNSNNLDS
KVGGNYNYLYRLFRKSNLKPFERDISTEIYQAGSTPCNGVEGFNCYFPLQSYGFQPTN
GVGYQPYRVVVLSFELLHAPATVCGPKKSTNLVKNKCVNFNFNGLTGTGVLTESNK
KFLPFQQFGRDIADTTDAVRDPQTLEILDITPCSFGGVSVITPGTNTSNQVAVLYQDV
NCTEVPVAIHADQLTPTWRVYSTGSNVFQTRAGCLIGAEHVNNSYECDIPIGAGICAS
YQTQTNSPRRRRSVASQSIIAYTMSLGAENSVAYSNNSIAIPTNFTISVTTEILPVSMTK
TSVDCTMYICGDSTECSNLLLQYGSFCTQLNRALTGIAVEQDKNTQEVFAQVKQIYK
TPPIKDFGGFNFSQILPDPSRRRRSFIEDLLFNKVTLADAGFIKQYGDCLGDIAARDLIC
AQKFNGLTVLPPLLTDEMIAQYTSALLAGTITSGWTFGAGAALQIPFAMQMAYRFNG
IGVTQNVLYENQKLIANQFNSAIGKIQDSLSSTASALGKLQDVVNQNAQALNTLVKQ
LSSNFGAISSVLNDILSRLDPPEAEVQIDRLITGRLQSLQTYVTQQLIRAAEIRASANLA
ATKMSECVLGQSKRVDFCGKGYHLMSFPQSAPHGVVFLHVTYVPAQEKNFTTAPAI
CHDGKAHFPREGVFVSNGTHWFVTQRNFYEPQIITTDNTFVSGNCDVVIGIVNNTVY
DPLQPELDSFKEELDKYFKNHTSPDVDLGDISGINASVVNIQKEIDRLNEVAKNLNES
LIDLQELGKYEQYIKWPWSGRRRRRRGSGGSGSGYIPEAPRDGQAYVRKDGEWVLL
STFLG** (SEQ ID NO: 148)
WuS_3F_D2P_GlyDSol_pVax
ggatccgccaccatggattggacctggatcttgtttctcgtcgcagctgccacaagagtccacagtatgtttgtatttctcgttctcctgcct
cttgtgtcctctcagtgtgtgaatctgacgaccagaactcagctcccacccgcatacactaacagtatcacgaggggcgtttattaccca
gacaaggttttccgaagcagttgtctgtatagtacacaggatttgttcctgccattctttagtaacgtgacttggtttcatgcgatccacgttt
ctggcacaaacggtaccaaaagattcgataaccccgtgctgcctttcaatgacggcgtgtatttcgcttctactgaaaagtccggcatca
tccggggatggatcttcggcactactttggatagcaaaacccaatccctgctgattgtgaataatgcaaccaacgtggtgatcaaagtct
gtgagtttcaattctgtaatgacccatttctgggcgtttactaccacaagaacaacaaaagttggatggagtccgaatttcgcgtctactca
tccgcgaacaattgcacatttgagtatgtgagtcaaccattcttgatggatcttgaagggaagcaaggcaatttcaagaacctgcggga
gtttgtatttaagaacattgacggctatttcaagatatattctaaacatactcccattaacctcgtgcgcgacttgccccagggattcagtgc
tctggaaccactggtcgatctccccatcggcattaatattacacgctttcaaactctcctcgctttgcatcggtcctatcttactccgggaga
tagctcaagcggatggacggcaggcgcggcggcatattatgttggatatctccaaccacgcacgttccttctgaaatataatgaaaatg
gcactattactgatgcagtcgactgcgccctggaccctctgtctgagaccaagtgtaccctgaagtcattcaccgttgagaagggaatct
accaaacctctaactttagggtacaacctactgagagcattgtccgcttcccgaatatcaccaatctttgtccgtttggtgaggtgtttaac
gcgacacgatttgcttccgtatacgcctggaatcgcaaacgcatcagcaactgtgtggctgattactcatttctctataattccgcttccttc
tctactttcaagtgttatggggtgaatgggactaaacttaatgacttgtgctttactaacgtgtatgctgatagcttcgtcattcgtggagatg
aggtcaggcaaatagctcccggacaaacagggaagatagcggactataactacaaactgcctgatgatttcaccgggtgcgtcatcg
cgtggaacagcaataacctcgatagcaaggttggcggaaactataattatctctatcgtttgtttaggaaaagcaatctcaagcccttcga
gcgggatattaatacaacgatatatcaagctggctctaccccgtgcaacggagtagagggcttcaattgctactttcctttgcagtcctac
ggattccaacccaccaacggagtgggctaccaaccataccgtgtcgtggttttgagtttcgaactgaaccacgcaccagcaacagtct
gcggaccgaagaagagtacaaaccttgtgaagaataagtgcgtgaactttaatttcaatggcctgactggaaccggagttctgacgga
atccaataagaaatttctgccgtttcagcaatttggacgggattgtgctggaacgactgatgccgtacgtgatcctcaaacactggaaatc
ctggacataaccccttgttcctttggtggcgtaagcgttattactccaggcacaaacacatcaaatcaagtcgccgtactgtatcaaggtg
tcaactgtactgaagtacctgtagccattcatgcaggacaactgacccctacatggcgagtgtattcaacgggaagcaacgtatttcaaa
ccagggccggctgtctcatcggagcagagcatgtcaataatagttatgaatgcgacatcccaataggtgctgggatctgcgcgagcta
ccaaacccaaactaatagcccacgaagacggagatctgtcgcgtcccaaagcattattgcgtacacgatgagcctctgtgcagaaaat
tcagttgcctacagcaacaatagcatcgctattccaaccaatttcactatcagctgtacaacagaaattctcccagtctccatgacgaaga
catcctgcgattgtacaatgtatatatgcggcgactcaacagaatgttcaaatttgttgctgcaatacgggtccttctgcacccaactcaat
cgagctcttacaggcatagcggtcgaacaagacaagaacacacaagaagtgtttgcccaagttaaacagtgttacaagacaccaccta
tcaaagatttcggcggttttaacttttctcagatcttgccagacccatctaggcggcggcgatcctttatcgaggaccttctcttcaataagg
taactcttgcagacgctggatttattaagcaatacggcgactgtctcggggatatcgccgctagggatctgatctgtgcccagaaatttaa
cggctgcacggtgctgccccctctgctgactgatgaaatgatagcacaatatacttctgcattgctggccggtaccattacatcaggatg
gacatttggtgccggggcggcgctccaaattcccttcgccatgcaaatggcctataggtttaacggcatcggggtgacccaaaacgtc
ctctatgagaatcaaaagctgattgctaaccagtttaactcagcaataggaaagattcaagactctctgtcaagtaccgcatccgcccttg
gaaagctccaagacgttgttaaccagaatgcacaagctctcaacacgctcgtgaaacaactctcttcaaattttggtgcgatctcttctgg
cccaaatgacattttgagccggcttcccaaggtagaagctgaagtacaaattgatcgcctgatcaccggacggctccaaagtctgcag
acgtacgtcacccagcaactgatacgggcagcggagatccgggcttctgccaacctggccgccacgaagatgagcgaatgcgtgct
cggacagtccaaaagagtagatttctgtggcaagggctatcatctcatgtcctttccccaatccgcccctcacggagttgtcttccttcatt
gcacttacgtccccgctcaagaaaagaattttactacggcacctgctatctgtcacgacgggaaagcccattttcctagagaaggtgtgt
ttgtatctaacggcacgcactggttcgtcacgcaacgtaacttttacgagccccagatcatcaccacagacaatacggatgtatcaggta
attgtgatgtcctgattggtatcgtcaataacactgtatacgatcctttgcaaccggaactggactcctttaaagaggaacttgataagtatt
tcaagaatcacacttccccagatgtcgatctcggggacatctcaggaattaatgcatcagtggtcaatattcaaaaggaaattgatcgctt
gaatgaggttgcaaagaatttgaatgaaagccttatcgaccttcaagagctgggcaaatatgagcagtacattaaatggccttggagcg
gtcgccggcgccgaaggcggggttccggcggtagcggtagcggttatattccagaagctcctcgcgatgggcaggcttatgtgagg
aaagatggtgaatgggtccttttgtccacgttcctcgggtagtaa (SEQ ID NO: 149)
ggauccgccaccauggauuggaccuggaucuuguuucucgucgcagcugccacaagaguccacaguauguuuguauuuc
ucguucuccugccucuuguguccucucagugugugaaucugacgaccagaacucagcucccacccgcauacacuaacagu
aucacgaggggcguuuauuacccagacaagguuuuccgaagcaguugucuguauaguacacaggauuuguuccugccau
ucuuuaguaacgugacuugguuucaugcgauccacguuucuggcacaaacgguaccaaaagauucgauaaccccgugcu
gccuuucaaugacggcguguauuucgcuucuacugaaaaguccggcaucauccggggauggaucuucggcacuacuuug
gauagcaaaacccaaucccugcugauugugaauaaugcaaccaacguggugaucaaagucugugaguuucaauucugua
augacccauuucugggcguuuacuaccacaagaacaacaaaaguuggauggaguccgaauuucgcgucuacucauccgcg
aacaauugcacauuugaguaugugagucaaccauucuugauggaucuugaagggaagcaaggcaauuucaagaaccugc
gggaguuuguauuuaagaacauugacggcuauuucaagauauauucuaaacauacucccauuaaccucgugcgcgacuu
gccccagggauucagugcucuggaaccacuggucgaucuccccaucggcauuaauauuacacgcuuucaaacucuccucg
cuuugcaucgguccuaucuuacuccgggagauagcucaagcggauggacggcaggcgcggcggcauauuauguuggaua
ucuccaaccacgcacguuccuucugaaauauaaugaaaauggcacuauuacugaugcagucgacugcgcccuggacccuc
ugucugagaccaaguguacccugaagucauucaccguugagaagggaaucuaccaaaccucuaacuuuaggguacaaccu
acugagagcauuguccgcuucccgaauaucaccaaucuuuguccguuuggugagguguuuaacgcgacacgauuugcuu
ccguauacgccuggaaucgcaaacgcaucagcaacuguguggcugauuacucauuucucuauaauuccgcuuccuucuc
uacuuucaaguguuauggggugaaugggacuaaacuuaaugacuugugcuuuacuaacguguaugcugauagcuucgu
cauucguggagaugaggucaggcaaauagcucccggacaaacagggaagauagcggacuauaacuacaaacugccugaug
auuucaccgggugcgucaucgcguggaacagcaauaaccucgauagcaagguuggcggaaacuauaauuaucucuaucg
uuuguuuaggaaaagcaaucucaagcccuucgagcgggauauuaauacaacgauauaucaagcuggcucuaccccgugca
acggaguagagggcuucaauugcuacuuuccuuugcaguccuacggauuccaacccaccaacggagugggcuaccaacca
uaccgugucgugguuuugaguuucgaacugaaccacgcaccagcaacagucugcggaccgaagaagaguacaaaccuug
ugaagaauaagugcgugaacuuuaauuucaauggccugacuggaaccggaguucugacggaauccaauaagaaauuucu
gccguuucagcaauuuggacgggauugugcuggaacgacugaugccguacgugauccucaaacacuggaaauccuggac
auaaccccuuguuccuuugguggcguaagcguuauuacuccaggcacaaacacaucaaaucaagucgccguacuguauca
aggugucaacuguacugaaguaccuguagccauucaugcaggacaacugaccccuacauggcgaguguauucaacggga
agcaacguauuucaaaccagggccggcugucucaucggagcagagcaugucaauaauaguuaugaaugcgacaucccaau
aggugcugggaucugcgcgagcuaccaaacccaaacuaauagcccacgaagacggagaucugucgcgucccaaagcauua
uugcguacacgaugagccucugugcagaaaauucaguugccuacagcaacaauagcaucgcuauuccaaccaauuucacu
aucagcuguacaacagaaauucucccagucuccaugacgaagacauccugcgauuguacaauguauauaugcggcgacuc
aacagaauguucaaauuuguugcugcaauacggguccuucugcacccaacucaaucgagcucuuacaggcauagcgguc
gaacaagacaagaacacacaagaaguguuugcccaaguuaaacaguguuacaagacaccaccuaucaaagauuucggcgg
uuuuaacuuuucucagaucuugccagacccaucuaggcggcggcgauccuuuaucgaggaccuucucuucaauaaggua
acucuugcagacgcuggauuuauuaagcaauacggcgacugucucggggauaucgccgcuagggaucugaucugugccc
agaaauuuaacggcugcacggugcugcccccucugcugacugaugaaaugauagcacaauauacuucugcauugcuggc
cgguaccauuacaucaggauggacauuuggugccggggcggcgcuccaaauucccuucgccaugcaaauggccuauagg
uuuaacggcaucggggugacccaaaacguccucuaugagaaucaaaagcugauugcuaaccaguuuaacucagcaauagg
aaagauucaagacucucugucaaguaccgcauccgcccuuggaaagcuccaagacguuguuaaccagaaugcacaagcuc
ucaacacgcucgugaaacaacucucuucaaauuuuggugcgaucucuucuggcccaaaugacauuuugagccggcuucc
caagguagaagcugaaguacaaauugaucgccugaucaccggacggcuccaaagucugcagacguacgucacccagcaac
ugauacgggcagcggagauccgggcuucugccaaccuggccgccacgaagaugagcgaaugcgugcucggacaguccaa
aagaguagauuucuguggcaagggcuaucaucucauguccuuuccccaauccgccccucacggaguugucuuccuucau
ugcacuuacguccccgcucaagaaaagaauuuuacuacggcaccugcuaucugucacgacgggaaagcccauuuuccuag
agaagguguguuuguaucuaacggcacgcacugguucgucacgcaacguaacuuuuacgagccccagaucaucaccacag
acaauacggauguaucagguaauugugauguccugauugguaucgucaauaacacuguauacgauccuuugcaaccgga
acuggacuccuuuaaagaggaacuugauaaguauuucaagaaucacacuuccccagaugucgaucucggggacaucucag
gaauuaaugcaucaguggucaauauucaaaaggaaauugaucgcuugaaugagguugcaaagaauuugaaugaaagccu
uaucgaccuucaagagcugggcaaauaugagcaguacauuaaauggccuuggagcggucgccggcgccgaaggcggggu
uccggcgguagcgguagcgguuauauuccagaagcuccucgcgaugggcaggcuuaugugaggaaagauggugaaugg
guccuuuuguccacguuccucggguaguaa (SEQ ID NO: 150)
MDWTWILFLVAAATRVHSMFVFLVLLPLVSSQCVNLTTRTQLPPAYTNSITRGVYYP
DKVFRSSCLYSTQDLFLPFFSNVTWFHAIHVSGTNGTKRFDNPVLPFNDGVYFASTEK
SGIIRGWIFGTTLDSKTQSLLIVNNATNVVIKVCEFQFCNDPFLGVYYHKNNKSWMES
EFRVYSSANNCTFEYVSQPFLMDLEGKQGNFKNLREFVFKNIDGYFKIYSKHTPINLV
RDLPQGFSALEPLVDLPIGINITRFQTLLALHRSYLTPGDSSSGWTAGAAAYYVGYLQ
PRTFLLKYNENGTITDAVDCALDPLSETKCTLKSFTVEKGIYQTSNFRVQPTESIVRFP
NITNLCPFGEVFNATRFASVYAWNRKRISNCVADYSFLYNSASFSTFKCYGVNGTKL
NDLCFTNVYADSFVIRGDEVRQIAPGQTGKIADYNYKLPDDFTGCVIAWNSNNLDSK
VGGNYNYLYRLFRKSNLKPFERDINTTIYQAGSTPCNGVEGFNCYFPLQSYGFQPTN
GVGYQPYRVVVLSFELNHAPATVCGPKKSTNLVKNKCVNFNFNGLTGTGVLTESNK
KFLPFQQFGRDCAGTTDAVRDPQTLEILDITPCSFGGVSVITPGTNTSNQVAVLYQGV
NCTEVPVAIHAGQLTPTWRVYSTGSNVFQTRAGCLIGAEHVNNSYECDIPIGAGICAS
YQTQTNSPRRRRSVASQSIIAYTMSLCAENSVAYSNNSIAIPTNFTISCTTEILPVSMTK
TSCDCTMYICGDSTECSNLLLQYGSFCTQLNRALTGIAVEQDKNTQEVFAQVKQCYK
TPPIKDFGGFNFSQILPDPSRRRRSFIEDLLFNKVTLADAGFIKQYGDCLGDIAARDLIC
AQKFNGCTVLPPLLTDEMIAQYTSALLAGTITSGWTFGAGAALQIPFAMQMAYRFN
GIGVTQNVLYENQKLIANQFNSAIGKIQDSLSSTASALGKLQDVVNQNAQALNTLVK
QLSSNFGAISSGPNDILSRLPKVEAEVQIDRLITGRLQSLQTYVTQQLIRAAEIRASANL
AATKMSECVLGQSKRVDFCGKGYHLMSFPQSAPHGVVFLHCTYVPAQEKNFTTAPA
ICHDGKAHFPREGVFVSNGTHWFVTQRNFYEPQIITTDNTDVSGNCDVLIGIVNNTVY
DPLQPELDSFKEELDKYFKNHTSPDVDLGDISGINASVVNIQKEIDRLNEVAKNLNES
LIDLQELGKYEQYIKWPWSGRRRRRRGSGGSGSGYIPEAPRDGQAYVRKDGEWVLL
STFLG** (SEQ ID NO: 151)
WuS_3F_D2P_GlyD3_pVax
ggatccgccaccatggactggacatggatacttttcttggtagcggcggcgacacgcgtgcactccatgtttgttttcctcgtcctgctcc
cacttgtctcaagtcaatgcgttaacctgactacgaggacgcagctcccgcccgcctacacaaactcttttacccggggtgtgtactacc
ccgacaaagttttccgcagttcatgtctccactcaacacaggacctctttctgccattcttctcaaatgtcacatggtttcacgccatccacg
tttccggcactaacggtaccaaacggttcgacaaccctgttctgccattcaatgatggggtgtattttgcgagcacagagaagtccaatat
aatcagaggttggatcttcggtacaacgctggacagtaaaactcaatctctgctgatagtgaataacgctacgaacgtcgtcattaaggt
gtgcgagtttcaattttgcaacgatccattcttgggagtgtactatcataagaacaacaaatcatggatggagagcgagtttagggtgtatt
cctctgcaaacaactgtacatttgaatacgtgagccagccttttcttatggacctcgaaggtaagcaaggtaacttcaagaacttgcggg
aatttgttttcaagaacattgatggatacttcaaaatttactccaaacatacccctatcaatctggtccgcgaccttccacaaggattttccgc
acttgaacccttggtcgacctgcctattggaatcaatatcacgcggtttcagacgcttctcgctctccatagatcctacctcacgcccggc
gacagttcaagtgggtggaccgcaggcgcggcggcctattatgtgggatacttgcaaccccgcacttttctcctgaaatataatgagaa
tgggaccataaccgatgcagttgattgtgccttggaccccctgtccgagaccaaatgcacgctgaagtctttcacagtagagaaggga
atttaccaaacttccaacttcagagttcaacccacagaatctatcgttcgctttcccaatattacaaatttgtgtccgtttggagaggtgttca
atgctacaaggtttgcttccgtatatgcctggaatcgtaaacgcatctctaattgcgtagcggactactcagttttgtataacagtgctagct
tctccactttcaagtgttacggcgttaatgggaccaagctgaatgacctgtgttttaccaacgtgtatgctgactccttcgtaataagaggg
gatgaggttaggcaaatcgcccctggccagacagggaaaatcgctgattacaattacaagttgccagatgactttaccgggtgtgtcat
cgcttggaactccaataatctggattccaaagttggtgggaactataattacctctatcggctgttcagaaaatccaaccttaagcccttcg
aaagagatatcaacactacaatttatcaggctggttcaactccgtgtaatggggtcgagggtttcaactgctacttcccgttgcagagttat
gggttccagccgacgaatggggtcgggtaccaaccgtacagagtagtagttctgtcctttgagttgaatcatgccccagcaacagtgtg
cggcccaaagaaatcaacaaaccttgttaagaataaatgcgtgaacttcaactttaacgggcttactgggactggggtgctcacagaat
ccaacaagaaattcttgccattccaacaatttggccgcgattgtgcagatacaaccgacgccgtgagagatccccaaacattggagata
cttgatatcactccctgctcttttggtggcgtcagcgtcatcaccccaggaaccaatacaagcaatcaagtggctgtcctttatcaagatgt
caattgtaccgaagtcccagtcgcaatacatgcggatcaactgaccccaacatggagagtttactcaacgggatctaacgtgtttcaaa
ctcgtgctggctgcctgataggagcggagcatgtgaataattcctatgaatgcgacattcccattggggctggaatctgtgcatcctatc
aaacacaaactaactctccccgccggcggcggagcgtcgccagccaaagcattattgcatatacgatgtccctgtgcgcagaaaattc
tgttgcatacagcaataactccatcgctatccctacaaactttaccatcagctgtacaaccgaaatcttgcccgtttctatgactaaaacaa
gttgtgactgcactatgtacatctgtggcgactcaacagagtgttctaaccttctgcttcaatatggatctttctgtacacaacttaatcgcgc
tctcaccggtatagctgttgagcaagataagaacactcaggaagttttcgcccaagtcaaacaatgttataaaacaccacccataaaag
acttcggcggatttaatttctctcaaatactgccggacccatccaggagacgaagaagcttcatagaagatcttctcttcaacaaggtgac
cctggccgatgcggggtttatcaagcaatatggcgactgtctcggcgatattgctgcacgcgatctgatatgtgcacagaaattcaatgg
gtgtaccgtgctcccacctctgctgacagatgaaatgatcgctcaatataccagtgcgctcttggctggaacaattactagtggttggact
tttggggctggagccgcactccaaatcccttttgccatgcaaatggcctatcgctttaatgggataggggtcactcagaatgtcttgtatg
aaaaccagaagttgattgctaaccaatttaattcagctatagggaaaattcaagacagcctcagtagtactgccagtgccctgggcaaa
ctgcaagatgtcgtgaaccaaaatgctcaagccctgaataccctcgttaagcaacttagctcaaactttggtgcgatttcctcaggcccta
atgacatcctctcaaggctgcctaaagtggaagctgaggtccaaatcgatcgcctgattacgggtcgcctgcaatcactccaaacatat
gtcacccagcagttgatcagagcggccgagatacgggcatcagcaaatttggcggccacgaaaatgtcagagtgcgtacttggtcaa
agtaaaagagttgatttctgcggaaaaggttaccaccttatgtctttcccccagtccgctccacatggagtggtctttctgcattgtacttat
gtgccagcccaagaaaagaattttactaccgcccccgctatttgtcatgatggtaaggcgcacttccccagagaaggagtgtttgtgtcc
aacgggactcactggtttgtgactcaaaggaacttttatgaacctcaaattatcaccacagataacacatttgtgtccgggaattgcgatgt
ggttatcggcattgttaataataccgtttacgatcccttgcaacctgagttggatagtttcaaggaagaacttgacaaatactttaagaatca
cacttccccggatgtagacctcggggacatttccggaattaatgcgagtgttgtgaatatacagaaagagatagaccgactcaacgag
gttgctaagaacctcaacgagagccttatcgatcttcaagaactcggcaaatacgagcaatacattaaatggccttggtccggcagaag
gagacggcgaaggggaagtggcggcagcggctctggatacatcccggaagctccacgggatgggcaagcatatgttcgcaaggat
ggagaatgggtccttcttagcaccttcttgggataatga (SEQ ID NO: 152)
ggauccgccaccauggacuggacauggauacuuuucuugguagcggcggcgacacgcgugcacuccauguuuguuuucc
ucguccugcucccacuugucucaagucaaugcguuaaccugacuacgaggacgcagcucccgcccgccuacacaaacucu
uuuacccgggguguguacuaccccgacaaaguuuuccgcaguucaugucuccacucaacacaggaccucuuucugccau
ucuucucaaaugucacaugguuucacgccauccacguuuccggcacuaacgguaccaaacgguucgacaacccuguucug
ccauucaaugaugggguguauuuugcgagcacagagaaguccaauauaaucagagguuggaucuucgguacaacgcugg
acaguaaaacucaaucucugcugauagugaauaacgcuacgaacgucgucauuaaggugugcgaguuucaauuuugcaa
cgauccauucuugggaguguacuaucauaagaacaacaaaucauggauggagagcgaguuuaggguguauuccucugca
aacaacuguacauuugaauacgugagccagccuuuucuuauggaccucgaagguaagcaagguaacuucaagaacuugc
gggaauuuguuuucaagaacauugauggauacuucaaaauuuacuccaaacauaccccuaucaaucugguccgcgaccuu
ccacaaggauuuuccgcacuugaacccuuggucgaccugccuauuggaaucaauaucacgcgguuucagacgcuucucg
cucuccauagauccuaccucacgcccggcgacaguucaaguggguggaccgcaggcgcggcggccuauuaugugggaua
cuugcaaccccgcacuuuucuccugaaauauaaugagaaugggaccauaaccgaugcaguugauugugccuuggaccccc
uguccgagaccaaaugcacgcugaagucuuucacaguagagaagggaauuuaccaaacuuccaacuucagaguucaaccc
acagaaucuaucguucgcuuucccaauauuacaaauuuguguccguuuggagagguguucaaugcuacaagguuugcuu
ccguauaugccuggaaucguaaacgcaucucuaauugcguagcggacuacucaguuuuguauaacagugcuagcuucuc
cacuuucaaguguuacggcguuaaugggaccaagcugaaugaccuguguuuuaccaacguguaugcugacuccuucgua
auaagaggggaugagguuaggcaaaucgccccuggccagacagggaaaaucgcugauuacaauuacaaguugccagaug
acuuuaccgggugugucaucgcuuggaacuccaauaaucuggauuccaaaguuggugggaacuauaauuaccucuaucg
gcuguucagaaaauccaaccuuaagcccuucgaaagagauaucaacacuacaauuuaucaggcugguucaacuccgugua
auggggucgaggguuucaacugcuacuucccguugcagaguuauggguuccagccgacgaauggggucggguaccaacc
guacagaguaguaguucuguccuuugaguugaaucaugccccagcaacagugugcggcccaaagaaaucaacaaaccuug
uuaagaauaaaugcgugaacuucaacuuuaacgggcuuacugggacuggggugcucacagaauccaacaagaaauucuu
gccauuccaacaauuuggccgcgauugugcagauacaaccgacgccgugagagauccccaaacauuggagauacuugaua
ucacucccugcucuuuugguggcgucagcgucaucaccccaggaaccaauacaagcaaucaaguggcuguccuuuaucaa
gaugucaauuguaccgaagucccagucgcaauacaugcggaucaacugaccccaacauggagaguuuacucaacgggauc
uaacguguuucaaacucgugcuggcugccugauaggagcggagcaugugaauaauuccuaugaaugcgacauucccauu
ggggcuggaaucugugcauccuaucaaacacaaacuaacucuccccgccggcggcggagcgucgccagccaaagcauuau
ugcauauacgaugucccugugcgcagaaaauucuguugcauacagcaauaacuccaucgcuaucccuacaaacuuuacca
ucagcuguacaaccgaaaucuugcccguuucuaugacuaaaacaaguugugacugcacuauguacaucuguggcgacuc
aacagaguguucuaaccuucugcuucaauauggaucuuucuguacacaacuuaaucgcgcucucaccgguauagcuguu
gagcaagauaagaacacucaggaaguuuucgcccaagucaaacaauguuauaaaacaccacccauaaaagacuucggcgga
uuuaauuucucucaaauacugccggacccauccaggagacgaagaagcuucauagaagaucuucucuucaacaaggugac
ccuggccgaugcgggguuuaucaagcaauauggcgacugucucggcgauauugcugcacgcgaucugauaugugcacag
aaauucaauggguguaccgugcucccaccucugcugacagaugaaaugaucgcucaauauaccagugcgcucuuggcug
gaacaauuacuagugguuggacuuuuggggcuggagccgcacuccaaaucccuuuugccaugcaaauggccuaucgcuu
uaaugggauaggggucacucagaaugucuuguaugaaaaccagaaguugauugcuaaccaauuuaauucagcuauaggg
aaaauucaagacagccucaguaguacugccagugcccugggcaaacugcaagaugucgugaaccaaaaugcucaagcccu
gaauacccucguuaagcaacuuagcucaaacuuuggugcgauuuccucaggcccuaaugacauccucucaaggcugccua
aaguggaagcugagguccaaaucgaucgccugauuacgggucgccugcaaucacuccaaacauaugucacccagcaguug
aucagagcggccgagauacgggcaucagcaaauuuggcggccacgaaaaugucagagugcguacuuggucaaaguaaaa
gaguugauuucugcggaaaagguuaccaccuuaugucuuucccccaguccgcuccacauggaguggucuuucugcauug
uacuuaugugccagcccaagaaaagaauuuuacuaccgcccccgcuauuugucaugaugguaaggcgcacuuccccagag
aaggaguguuuguguccaacgggacucacugguuugugacucaaaggaacuuuuaugaaccucaaauuaucaccacaga
uaacacauuuguguccgggaauugcgaugugguuaucggcauuguuaauaauaccguuuacgaucccuugcaaccugag
uuggauaguuucaaggaagaacuugacaaauacuuuaagaaucacacuuccccggauguagaccucggggacauuuccg
gaauuaaugcgaguguugugaauauacagaaagagauagaccgacucaacgagguugcuaagaaccucaacgagagccuu
aucgaucuucaagaacucggcaaauacgagcaauacauuaaauggccuugguccggcagaaggagacggcgaaggggaag
uggcggcagcggcucuggauacaucccggaagcuccacgggaugggcaagcauauguucgcaaggauggagaauggguc
cuucuuagcaccuucuugggauaauga (SEQ ID NO: 153)
MDWTWILFLVAAATRVHSMFVFLVLLPLVSSQCVNLTTRTQLPPAYTNSFTRGVYY
PDKVFRSSCLHSTQDLFLPFFSNVTWFHAIHVSGTNGTKRFDNPVLPFNDGVYFASTE
KSNIIRGWIFGTTLDSKTQSLLIVNNATNVVIKVCEFQFCNDPFLGVYYHKNNKSWM
ESEFRVYSSANNCTFEYVSQPFLMDLEGKQGNFKNLREFVFKNIDGYFKIYSKHTPIN
LVRDLPQGFSALEPLVDLPIGINITRFQTLLALHRSYLTPGDSSSGWTAGAAAYYVGY
LQPRTFLLKYNENGTITDAVDCALDPLSETKCTLKSFTVEKGIYQTSNFRVQPTESIVR
FPNITNLCPFGEVFNATRFASVYAWNRKRISNCVADYSVLYNSASFSTFKCYGVNGT
KLNDLCFTNVYADSFVIRGDEVRQIAPGQTGKIADYNYKLPDDFTGCVIAWNSNNLD
SKVGGNYNYLYRLFRKSNLKPFERDINTTIYQAGSTPCNGVEGFNCYFPLQSYGFQPT
NGVGYQPYRVVVLSFELNHAPATVCGPKKSTNLVKNKCVNFNFNGLTGTGVLTESN
KKFLPFQQFGRDCADTTDAVRDPQTLEILDITPCSFGGVSVITPGTNTSNQVAVLYQD
VNCTEVPVAIHADQLTPTWRVYSTGSNVFQTRAGCLIGAEHVNNSYECDIPIGAGICA
SYQTQTNSPRRRRSVASQSIIAYTMSLCAENSVAYSNNSIAIPTNFTISCTTEILPVSMT
KTSCDCTMYICGDSTECSNLLLQYGSFCTQLNRALTGIAVEQDKNTQEVFAQVKQCY
KTPPIKDFGGFNFSQILPDPSRRRRSFIEDLLFNKVTLADAGFIKQYGDCLGDIAARDLI
CAQKFNGCTVLPPLLTDEMIAQYTSALLAGTITSGWTFGAGAALQIPFAMQMAYRFN
GIGVTQNVLYENQKLIANQFNSAIGKIQDSLSSTASALGKLQDVVNQNAQALNTLVK
QLSSNFGAISSGPNDILSRLPKVEAEVQIDRLITGRLQSLQTYVTQQLIRAAEIRASANL
AATKMSECVLGQSKRVDFCGKGYHLMSFPQSAPHGVVFLHCTYVPAQEKNFTTAPA
ICHDGKAHFPREGVFVSNGTHWFVTQRNFYEPQIITTDNTFVSGNCDVVIGIVNNTVY
DPLQPELDSFKEELDKYFKNHTSPDVDLGDISGINASVVNIQKEIDRLNEVAKNLNES
LIDLQELGKYEQYIKWPWSGRRRRRRGSGGSGSGYIPEAPRDGQAYVRKDGEWVLL
STFLG** (SEQ ID NO: 154)
WuS_3F_D2P_GlyD2_pVax
ggatccgccaccatggattggacatggatactgtttctggtcgctgctgccacacgtgtccacagcatgtttgtcttcttggtgctcttgcc
tcttgtgagctcccaatgtgtgaatctgactacacgtacgcaacttccgcctgcctacaccaactctttcaccagaggcgtgtattatccg
gataaggtgttcaggagctcctgccttcattcaacacaggatttgtttctgcctttcttttcaaacgttacttggttccatgccatccacgtgtc
aggaacaaatggtaccaagagattcgataacccagttctcccttttaatgatggagtctattttgcaagcactgagaaaagtaatattatac
gaggttggattttcggaacgacactcgacagtaaaacacaatccctgttgatagtcaacaatgccacgaacgtagttataaaagtttgcg
aatttcaattttgcaacgatcctttcctgggtgtgtactatcacaagaacaacaaatcttggatggaaagcgagtttcgagtgtattcttcag
caaacaactgtactttcgaatatgtttctcaaccattcctgatggatctcgaaggtaaacagggcaactttaagaatctgagagagtttgtg
tttaagaacattgacggctattttaagatttacagcaaacatacgcctataaaccttgtgagagacctgcctcaagggtttagcgccctgg
aaccactcgtggacctgcctatcggcatcaatattaccagatttcaaacgctccttgccctgcataggagctatttgacacctggggactc
ttctagcggctggactgcaggcgctgccgcttattacgtgggatatctccagcctagaactttcctcttgaaatacaacgagaatggaac
cataacagacgcagttgattgtgctctcgaccccttgtccgagaccaaatgcacactgaaaagttttaccgtggagaaagggatctatca
aactagtaatttccgcgttcaacccactgagagcatagtgaggtttcctaacattacaaatctttgcccgtttggggaagtgtttaatgcca
ctcgttttgctagtgtatacgcctggaatcgaaagcggatttccaattgcgttgctgactacagtgtactctataatagcgcttcatttagca
ccttcaagtgctacggggttaacgggaccaaactcaatgacctctgcttcacgaacgtttacgccgactcctttgtcattcgaggtgacg
aagtaagacaaatcgccccaggccagactggaaagatcgcggactacaactataagctgccagacgacttcactggatgtgtgatcg
cctggaatagtaacaacctcgactccaaggtgggtggcaattacaattatctctataggctgttcaggaagagtaatttgaaaccattcga
gcgcgacataaatacaacaatctaccaagcgggttctaccccttgcaacggcgtggaaggttttaattgttacttccctctccaaagctac
gggtttcaaccaacaaacggcgtgggataccaaccatacagggtggttgtgttgagcttcgaattgaatcatgcacctgcaacagtgtg
tgggcccaagaagtccaccaatctcgttaagaataaatgcgtgaacttcaactttaacgggttgacagggaccggcgtgcttacggaa
agtaataagaaattccttcccttccagcaatttggtcgcgactgtgcggatacaacggacgcagtgcgagacccacagacattggagat
cctggacataacaccttgctcttttggcggggtctccgtaataacacctggaacaaataccagcaatcaagtagcggtcttgtatcaaga
tgtaaactgtactgaagtcccagttgctatacatgcagaccaacttacaccgacgtggcgcgtgtattctacgggctccaacgtattcca
aaccagagcagggtgcttgataggggcagagcacgtcaacaatagctatgagtgtgatatcccgataggtgctggaatctgcgcaag
ttaccagacccaaaccaatagcccccgccggagacgatcagtggcaagccagtctataatagcctacacgatgtcactgtgtgccga
aaatagcgttgcctatagtaacaatagcatcgccattccaaccaatttcacaatatcagtcactactgagattctgcctgtgtcaatgacta
aaactagtgtggactgcacaatgtatatttgcggcgattccacagaatgtagcaatcttctgctgcaatatgggagtttctgtacacaattg
aatcgggcccttactggaatcgccgtagagcaggacaagaacacccaagaagtctttgcgcaagtcaaacaatgttataagactcccc
caattaaagattttggcggctttaattttagccaaatacttcccgaccccagccgccgacgacgctcctttatcgaagatctgttgtttaata
aagtcacattggctgatgctggctttatcaaacaatacggtgattgtctgggtgatattgcagcccgagatctgatctgcgcccaaaagtt
taacggcttgaccgttctcccgccactcctgacagatgagatgatcgcgcaatatacctctgcactcctggcgggaacaatcactagtg
gttggactttcggcgccggcgctgcactgcaaattcccttcgccatgcaaatggcctatcggtttaacggaattggtgtgactcagaatg
tgctttacgaaaatcagaaactcatagctaatcagtttaacagcgcaatcgggaaaattcaggattccctcagcagcaccgctagcgcct
tgggcaagctgcaggacgttgtaaaccagaacgctcaggccctcaacactctcgttaaacaattgagctctaactttggggccataagc
agtggtcctaacgacatcctgagtcgtctgccaaaggtagaggccgaagtgcaaatcgaccggctcatcactggaagactgcaaagc
ctgcaaacctatgtcacacagcaacttatacgggccgccgaaatcagggcctcagcaaacctcgcagcaacaaagatgagcgagtgt
gtgctgggccaatccaagcgcgtggacttctgtggtaagggataccatctgatgtcctttccccaatccgcgcctcatggagtagttttcc
tgcacgttacgtatgtgcctgcccaagagaagaactttacaacagcaccagccatttgtcatgacggaaaagcccattttcctagagaa
ggagtctttgtttccaatgggacacattggtttgttacccagcgtaacttttatgagccacaaatcatcaccacggacaatactttcgtgag
cggtaattgtgatgtggtcattggcatagtgaataacactgtttacgaccccctgcaaccggaattggacagcttcaaagaagaactgga
caagtacttcaagaaccacacatccccagacgtagacctcggagatatttccggaattaacgcatcagtagttaacatccagaaagaaa
tagatcgactgaatgaggtcgctaagaacttgaacgaatcacttatagatctccaggaactcggcaaatatgagcaatatattaaatggc
cctggtcaggtcgcagaagacgccgccggggttccggcggatctggatctggatatattcccgaagctccacgggatgggcaagcc
tacgtaagaaaggatggagaatgggtacttttgtccacgttcttgggctagtag (SEQ ID NO: 155)
ggauccgccaccauggauuggacauggauacuguuucuggucgcugcugccacacguguccacagcauguuugucuucu
uggugcucuugccucuugugagcucccaaugugugaaucugacuacacguacgcaacuuccgccugccuacaccaacuc
uuucaccagaggcguguauuauccggauaagguguucaggagcuccugccuucauucaacacaggauuuguuucugccu
uucuuuucaaacguuacuugguuccaugccauccacgugucaggaacaaaugguaccaagagauucgauaacccaguuc
ucccuuuuaaugauggagucuauuuugcaagcacugagaaaaguaauauuauacgagguuggauuuucggaacgacacu
cgacaguaaaacacaaucccuguugauagucaacaaugccacgaacguaguuauaaaaguuugcgaauuucaauuuugca
acgauccuuuccuggguguguacuaucacaagaacaacaaaucuuggauggaaagcgaguuucgaguguauucuucagc
aaacaacuguacuuucgaauauguuucucaaccauuccugauggaucucgaagguaaacagggcaacuuuaagaaucuga
gagaguuuguguuuaagaacauugacggcuauuuuaagauuuacagcaaacauacgccuauaaaccuugugagagaccu
gccucaaggguuuagcgcccuggaaccacucguggaccugccuaucggcaucaauauuaccagauuucaaacgcuccuug
cccugcauaggagcuauuugacaccuggggacucuucuagcggcuggacugcaggcgcugccgcuuauuacgugggaua
ucuccagccuagaacuuuccucuugaaauacaacgagaauggaaccauaacagacgcaguugauugugcucucgaccccu
uguccgagaccaaaugcacacugaaaaguuuuaccguggagaaagggaucuaucaaacuaguaauuuccgcguucaaccc
acugagagcauagugagguuuccuaacauuacaaaucuuugcccguuuggggaaguguuuaaugccacucguuuugcua
guguauacgccuggaaucgaaagcggauuuccaauugcguugcugacuacaguguacucuauaauagcgcuucauuuag
caccuucaagugcuacgggguuaacgggaccaaacucaaugaccucugcuucacgaacguuuacgccgacuccuuuguca
uucgaggugacgaaguaagacaaaucgccccaggccagacuggaaagaucgcggacuacaacuauaagcugccagacgac
uucacuggaugugugaucgccuggaauaguaacaaccucgacuccaagguggguggcaauuacaauuaucucuauaggc
uguucaggaagaguaauuugaaaccauucgagcgcgacauaaauacaacaaucuaccaagcggguucuaccccuugcaac
ggcguggaagguuuuaauuguuacuucccucuccaaagcuacggguuucaaccaacaaacggcgugggauaccaaccau
acagggugguuguguugagcuucgaauugaaucaugcaccugcaacagugugugggcccaagaaguccaccaaucucgu
uaagaauaaaugcgugaacuucaacuuuaacggguugacagggaccggcgugcuuacggaaaguaauaagaaauuccuu
cccuuccagcaauuuggucgcgacugugcggauacaacggacgcagugcgagacccacagacauuggagauccuggacau
aacaccuugcucuuuuggcggggucuccguaauaacaccuggaacaaauaccagcaaucaaguagcggucuuguaucaag
auguaaacuguacugaagucccaguugcuauacaugcagaccaacuuacaccgacguggcgcguguauucuacgggcuc
caacguauuccaaaccagagcagggugcuugauaggggcagagcacgucaacaauagcuaugagugugauaucccgaua
ggugcuggaaucugcgcaaguuaccagacccaaaccaauagcccccgccggagacgaucaguggcaagccagucuauaau
agccuacacgaugucacugugugccgaaaauagcguugccuauaguaacaauagcaucgccauuccaaccaauuucacaa
uaucagucacuacugagauucugccugugucaaugacuaaaacuaguguggacugcacaauguauauuugcggcgauuc
cacagaauguagcaaucuucugcugcaauaugggaguuucuguacacaauugaaucgggcccuuacuggaaucgccgua
gagcaggacaagaacacccaagaagucuuugcgcaagucaaacaauguuauaagacucccccaauuaaagauuuuggcgg
cuuuaauuuuagccaaauacuucccgaccccagccgccgacgacgcuccuuuaucgaagaucuguuguuuaauaaaguca
cauuggcugaugcuggcuuuaucaaacaauacggugauugucugggugauauugcagcccgagaucugaucugcgccca
aaaguuuaacggcuugaccguucucccgccacuccugacagaugagaugaucgcgcaauauaccucugcacuccuggcgg
gaacaaucacuagugguuggacuuucggcgccggcgcugcacugcaaauucccuucgccaugcaaauggccuaucgguu
uaacggaauuggugugacucagaaugugcuuuacgaaaaucagaaacucauagcuaaucaguuuaacagcgcaaucggg
aaaauucaggauucccucagcagcaccgcuagcgccuugggcaagcugcaggacguuguaaaccagaacgcucaggcccu
caacacucucguuaaacaauugagcucuaacuuuggggccauaagcagugguccuaacgacauccugagucgucugccaa
agguagaggccgaagugcaaaucgaccggcucaucacuggaagacugcaaagccugcaaaccuaugucacacagcaacuu
auacgggccgccgaaaucagggccucagcaaaccucgcagcaacaaagaugagcgagugugugcugggccaauccaagcg
cguggacuucugugguaagggauaccaucugauguccuuuccccaauccgcgccucauggaguaguuuuccugcacguu
acguaugugccugcccaagagaagaacuuuacaacagcaccagccauuugucaugacggaaaagcccauuuuccuagaga
aggagucuuuguuuccaaugggacacauugguuuguuacccagcguaacuuuuaugagccacaaaucaucaccacggac
aauacuuucgugagcgguaauugugauguggucauuggcauagugaauaacacuguuuacgacccccugcaaccggaau
uggacagcuucaaagaagaacuggacaaguacuucaagaaccacacauccccagacguagaccucggagauauuuccgga
auuaacgcaucaguaguuaacauccagaaagaaauagaucgacugaaugaggucgcuaagaacuugaacgaaucacuuau
agaucuccaggaacucggcaaauaugagcaauauauuaaauggcccuggucaggucgcagaagacgccgccgggguucc
ggcggaucuggaucuggauauauucccgaagcuccacgggaugggcaagccuacguaagaaaggauggagaauggguac
uuuuguccacguucuugggcuaguag (SEQ ID NO: 156)
MDWTWILFLVAAATRVHSMFVFLVLLPLVSSQCVNLTTRTQLPPAYTNSFTRGVYY
PDKVFRSSCLHSTQDLFLPFFSNVTWFHAIHVSGTNGTKRFDNPVLPFNDGVYFASTE
KSNIIRGWIFGTTLDSKTQSLLIVNNATNVVIKVCEFQFCNDPFLGVYYHKNNKSWM
ESEFRVYSSANNCTFEYVSQPFLMDLEGKQGNFKNLREFVFKNIDGYFKIYSKHTPIN
LVRDLPQGFSALEPLVDLPIGINITRFQTLLALHRSYLTPGDSSSGWTAGAAAYYVGY
LQPRTFLLKYNENGTITDAVDCALDPLSETKCTLKSFTVEKGIYQTSNFRVQPTESIVR
FPNITNLCPFGEVFNATRFASVYAWNRKRISNCVADYSVLYNSASFSTFKCYGVNGT
KLNDLCFTNVYADSFVIRGDEVRQIAPGQTGKIADYNYKLPDDFTGCVIAWNSNNLD
SKVGGNYNYLYRLFRKSNLKPFERDINTTIYQAGSTPCNGVEGFNCYFPLQSYGFQPT
NGVGYQPYRVVVLSFELNHAPATVCGPKKSTNLVKNKCVNFNFNGLTGTGVLTESN
KKFLPFQQFGRDCADTTDAVRDPQTLEILDITPCSFGGVSVITPGTNTSNQVAVLYQD
VNCTEVPVAIHADQLTPTWRVYSTGSNVFQTRAGCLIGAEHVNNSYECDIPIGAGICA
SYQTQTNSPRRRRSVASQSIIAYTMSLCAENSVAYSNNSIAIPTNFTISVTTEILPVSMT
KTSVDCTMYICGDSTECSNLLLQYGSFCTQLNRALTGIAVEQDKNTQEVFAQVKQC
YKTPPIKDFGGFNFSQILPDPSRRRRSFIEDLLFNKVTLADAGFIKQYGDCLGDIAARD
LICAQKFNGLTVLPPLLTDEMIAQYTSALLAGTITSGWTFGAGAALQIPFAMQMAYR
FNGIGVTQNVLYENQKLIANQFNSAIGKIQDSLSSTASALGKLQDVVNQNAQALNTL
VKQLSSNFGAISSGPNDILSRLPKVEAEVQIDRLITGRLQSLQTYVTQQLIRAAEIRASA
NLAATKMSECVLGQSKRVDFCGKGYHLMSFPQSAPHGVVFLHVTYVPAQEKNFTT
APAICHDGKAHFPREGVFVSNGTHWFVTQRNFYEPQIITTDNTFVSGNCDVVIGIVNN
TVYDPLQPELDSFKEELDKYFKNHTSPDVDLGDISGINASVVNIQKEIDRLNEVAKNL
NESLIDLQELGKYEQYIKWPWSGRRRRRRGSGGSGSGYIPEAPRDGQAYVRKDGEW
VLLSTFLG** (SEQ ID NO: 157)
WuS_3F_D2P_GlyD1_pVax
ggatccgccaccatggactggacatggatacttttcttggtggcagctgctacacgcgtccactcaatgttcgtctttctggtgctcttgcc
actggtgagcagccaatgcgttaacctcaccacacgcacgcagcttccacccgcatacactaactcctttacgcgcggcgtgtactatc
cagataaagtgttccgaagtagcgtcttgcatagcacccaggatctgtttctcccattctttagcaatgtcacatggttccacgctatccac
gtgtctgggacgaatggaactaaacgttttgacaatcctgttcttccttttaacgacggcgtatactttgctagtactgagaagtctaacatt
atccgcggctggattttcgggacaaccctggactccaaaacccagtctctgctgatagtaaacaatgccaccaacgtcgtcattaaagt
gtgcgagtttcaattctgcaacgacccctttctgggtgtctattaccacaagaacaataagtcttggatggagtcagaatttcgtgtctattc
ttctgccaataattgtacatttgagtatgtttctcaaccctttctcatggacctcgaaggcaagcaggggaattttaagaacctgcgggaatt
cgtctttaagaatatcgacggctatttcaaaatttacagcaaacacacgcctataaacctcgtgcgagatctcccccaaggcttctcagca
ttggagccattggtcgacttgccaatcggaattaatatcacaaggtttcagactctgctggccctgcatcgctcctatcttacccctggcg
attcctcaagtggctggacggccggcgcagcagcctattacgtcggctatctccagccaaggacgtttcttttgaagtataatgaaaatg
ggactattactgacgccgtcgactgcgctttggaccccctgagcgagacaaagtgcacattgaaaagcttcacggtggagaagggtat
ttatcaaacttccaactttagggtgcaaccaacagagagcatcgtgaggttccctaatatcactaatctctgtccatttggcgaggtgttta
acgcgaccagatttgcaagcgtatatgcctggaataggaagagaataagcaattgtgttgccgattactctgtcttgtataacagcgcat
ctttcagcacttttaagtgctatggtgtcaacgggacaaaacttaacgatctttgcttcaccaacgtttacgcagactcttttgtcatacgcg
gagatgaggtccgacaaatagctcccggccagactgggaaaatcgctgattataactataagcttccagatgacttcacaggatgcgta
attgcatggaactctaacaacctggactcaaaagttggtggcaactataactatctctatcgtttgttccgaaaatcaaaccttaaacccttt
gaacgggatattaatacgacaatttaccaagcagggagcactccttgtaacggtgtagaaggtttcaattgttattttcctctgcaatcata
cggattccaaccaacaaacggtgtgggttatcaaccttatcgggttgtagttttgagcttcgagcttaaccatgcacccgccacagtatgc
ggaccgaagaagagtacaaacctggttaagaataaatgtgtaaacttcaactttaatggactgacggggacgggagtactcactgaaa
gcaataagaaattcttgccttttcagcaattcgggcgggacatagcggacactacagacgccgtgcgcgacccccagactctcgaaat
cctggacataaccccgtgctcatttggcggagtttcagtcatcactccagggaccaatacctcaaaccaagtagctgtgctgtatcaaga
tgtgaattgcaccgaagtaccagtggccattcacgccgatcagctgaccccgacatggcgggtgtactcaaccggttcaaatgtgtttc
aaacaagagcaggttgtcttattggcgctgaacacgtgaataactcctatgaatgcgacatcccaattggtgccggaatctgtgcctctta
tcaaacacaaactaattcaccaaggcgtaggcgcagcgtcgcctctcaatcaattatagcctacaccatgtcactgggtgccgaaaact
ccgtcgcgtacagcaacaatagcattgccatccctaccaacttcaccatcagctgtacaactgagatcctgcctgtatccatgacaaaga
catcctgcgattgcactatgtacatctgtggagactctactgagtgtagcaacctcttgctccaatacgggagtttctgtacgcaactcaac
cgtgccctcaccggcatagccgtagagcaagataagaatacccaggaagtatttgcccaagtaaagcaaatttataagacgccaccca
ttaaagactttggcggtttcaacttcagtcaaatactgccagacccgtctcgcaggagaaggagttttattgaagacctgctctttaacaa
ggtgactcttgccgatgctggatttattaaacaatatggggattgtctcggagatatcgctgctcgggatcttatctgcgcgcagaaattca
acgggtgtaccgtgctcccacccttgctcactgacgaaatgatcgcgcaatatacctcagcacttctggcgggaactattacatctggtt
ggacattcggcgcaggggcagctctccaaattcccttcgcaatgcaaatggcttacaggttcaatggcataggtgtcacacaaaacgt
gctgtacgagaatcaaaagcttatagccaatcagtttaatagcgccataggcaagatccaagattccctgagctccacggcaagcgctc
tgggaaaattgcaagacgtagtcaatcaaaacgctcaagcgctgaatacccttgtgaaacaactttcttcaaactttggagctatctcatct
gggcccaacgatattctgagtcgactgccaaaggttgaagctgaagtccaaattgatcggttgatcacaggaaggctgcaatccctgc
agacttacgtgacccagcaactgatcagggcagccgaaataagggcttccgccaatctggcagccacaaagatgtctgaatgtgtctt
gggtcaaagcaaacgcgtcgatttctgtggcaaggggtaccatctgatgtcattccctcaatctgcccctcacggtgtggtatttctccatt
gcacttatgttcccgcacaggagaagaacttcacaacagctcccgccatttgccacgacggaaaggcgcattttccccgcgaaggtgt
cttcgtgtccaatgggactcattggtttgtgactcagaggaatttctatgagccgcagattatcaccaccgacaacactttcgtctccggta
actgcgacgtcgttatcggaatcgtcaataacacagtgtatgatcctctgcagccggagctggactcattcaaagaggagttggataaat
attttaagaatcatacaagccccgacgtcgatctgggcgatattagtggtatcaatgcgtccgtggttaacattcagaaagagattgaca
gactcaatgaggtcgccaagaacttgaacgaatccttgattgatctccaggagttgggcaagtatgagcaatatatcaagtggccatgg
tctgggcgaaggcgccgtcgcagagggtccggcggtagtggttccgggtacataccagaagctccacgagatggtcaagcttatgta
aggaaagacggagagtgggtcctgcttagcacattcttgggttgataa (SEQ ID NO: 158)
ggauccgccaccauggacuggacauggauacuuuucuugguggcagcugcuacacgcguccacucaauguucgucuuuc
uggugcucuugccacuggugagcagccaaugcguuaaccucaccacacgcacgcagcuuccacccgcauacacuaacucc
uuuacgcgcggcguguacuauccagauaaaguguuccgaaguagcgucuugcauagcacccaggaucuguuucucccau
ucuuuagcaaugucacaugguuccacgcuauccacgugucugggacgaauggaacuaaacguuuugacaauccuguucu
uccuuuuaacgacggcguauacuuugcuaguacugagaagucuaacauuauccgcggcuggauuuucgggacaacccug
gacuccaaaacccagucucugcugauaguaaacaaugccaccaacgucgucauuaaagugugcgaguuucaauucugcaa
cgaccccuuucugggugucuauuaccacaagaacaauaagucuuggauggagucagaauuucgugucuauucuucugcc
aauaauuguacauuugaguauguuucucaacccuuucucauggaccucgaaggcaagcaggggaauuuuaagaaccugc
gggaauucgucuuuaagaauaucgacggcuauuucaaaauuuacagcaaacacacgccuauaaaccucgugcgagaucuc
ccccaaggcuucucagcauuggagccauuggucgacuugccaaucggaauuaauaucacaagguuucagacucugcugg
cccugcaucgcuccuaucuuaccccuggcgauuccucaaguggcuggacggccggcgcagcagccuauuacgucggcua
ucuccagccaaggacguuucuuuugaaguauaaugaaaaugggacuauuacugacgccgucgacugcgcuuuggacccc
cugagcgagacaaagugcacauugaaaagcuucacgguggagaaggguauuuaucaaacuuccaacuuuagggugcaac
caacagagagcaucgugagguucccuaauaucacuaaucucuguccauuuggcgagguguuuaacgcgaccagauuugc
aagcguauaugccuggaauaggaagagaauaagcaauuguguugccgauuacucugucuuguauaacagcgcaucuuuc
agcacuuuuaagugcuauggugucaacgggacaaaacuuaacgaucuuugcuucaccaacguuuacgcagacucuuuug
ucauacgcggagaugagguccgacaaauagcucccggccagacugggaaaaucgcugauuauaacuauaagcuuccagau
gacuucacaggaugcguaauugcauggaacucuaacaaccuggacucaaaaguugguggcaacuauaacuaucucuaucg
uuuguuccgaaaaucaaaccuuaaacccuuugaacgggauauuaauacgacaauuuaccaagcagggagcacuccuugua
acgguguagaagguuucaauuguuauuuuccucugcaaucauacggauuccaaccaacaaacgguguggguuaucaacc
uuaucggguuguaguuuugagcuucgagcuuaaccaugcacccgccacaguaugcggaccgaagaagaguacaaaccug
guuaagaauaaauguguaaacuucaacuuuaauggacugacggggacgggaguacucacugaaagcaauaagaaauucu
ugccuuuucagcaauucgggcgggacauagcggacacuacagacgccgugcgcgacccccagacucucgaaauccuggac
auaaccccgugcucauuuggcggaguuucagucaucacuccagggaccaauaccucaaaccaaguagcugugcuguauca
agaugugaauugcaccgaaguaccaguggccauucacgccgaucagcugaccccgacauggcggguguacucaaccggu
ucaaauguguuucaaacaagagcagguugucuuauuggcgcugaacacgugaauaacuccuaugaaugcgacaucccaa
uuggugccggaaucugugccucuuaucaaacacaaacuaauucaccaaggcguaggcgcagcgucgccucucaaucaauu
auagccuacaccaugucacugggugccgaaaacuccgucgcguacagcaacaauagcauugccaucccuaccaacuucacc
aucagcuguacaacugagauccugccuguauccaugacaaagacauccugcgauugcacuauguacaucuguggagacuc
uacugaguguagcaaccucuugcuccaauacgggaguuucuguacgcaacucaaccgugcccucaccggcauagccguag
agcaagauaagaauacccaggaaguauuugcccaaguaaagcaaauuuauaagacgccacccauuaaagacuuuggcggu
uucaacuucagucaaauacugccagacccgucucgcaggagaaggaguuuuauugaagaccugcucuuuaacaagguga
cucuugccgaugcuggauuuauuaaacaauauggggauugucucggagauaucgcugcucgggaucuuaucugcgcgc
agaaauucaacggguguaccgugcucccacccuugcucacugacgaaaugaucgcgcaauauaccucagcacuucuggcg
ggaacuauuacaucugguuggacauucggcgcaggggcagcucuccaaauucccuucgcaaugcaaauggcuuacaggu
ucaauggcauaggugucacacaaaacgugcuguacgagaaucaaaagcuuauagccaaucaguuuaauagcgccauaggc
aagauccaagauucccugagcuccacggcaagcgcucugggaaaauugcaagacguagucaaucaaaacgcucaagcgcu
gaauacccuugugaaacaacuuucuucaaacuuuggagcuaucucaucugggcccaacgauauucugagucgacugccaa
agguugaagcugaaguccaaauugaucgguugaucacaggaaggcugcaaucccugcagacuuacgugacccagcaacu
gaucagggcagccgaaauaagggcuuccgccaaucuggcagccacaaagaugucugaaugugucuugggucaaagcaaac
gcgucgauuucuguggcaagggguaccaucugaugucauucccucaaucugccccucacggugugguauuucuccauug
cacuuauguucccgcacaggagaagaacuucacaacagcucccgccauuugccacgacggaaaggcgcauuuuccccgcg
aaggugucuucguguccaaugggacucauugguuugugacucagaggaauuucuaugagccgcagauuaucaccaccga
caacacuuucgucuccgguaacugcgacgucguuaucggaaucgucaauaacacaguguaugauccucugcagccggag
cuggacucauucaaagaggaguuggauaaauauuuuaagaaucauacaagccccgacgucgaucugggcgauauuagug
guaucaaugcguccgugguuaacauucagaaagagauugacagacucaaugaggucgccaagaacuugaacgaauccuu
gauugaucuccaggaguugggcaaguaugagcaauauaucaaguggccauggucugggcgaaggcgccgucgcagaggg
uccggcgguagugguuccggguacauaccagaagcuccacgagauggucaagcuuauguaaggaaagacggagaguggg
uccugcuuagcacauucuuggguugauaa (SEQ ID NO: 159)
MDWTWILFLVAAATRVHSMFVFLVLLPLVSSQCVNLTTRTQLPPAYTNSFTRGVYY
PDKVFRSSVLHSTQDLFLPFFSNVTWFHAIHVSGTNGTKRFDNPVLPFNDGVYFASTE
KSNIIRGWIFGTTLDSKTQSLLIVNNATNVVIKVCEFQFCNDPFLGVYYHKNNKSWM
ESEFRVYSSANNCTFEYVSQPFLMDLEGKQGNFKNLREFVFKNIDGYFKIYSKHTPIN
LVRDLPQGFSALEPLVDLPIGINITRFQTLLALHRSYLTPGDSSSGWTAGAAAYYVGY
LQPRTFLLKYNENGTITDAVDCALDPLSETKCTLKSFTVEKGIYQTSNFRVQPTESIVR
FPNITNLCPFGEVFNATRFASVYAWNRKRISNCVADYSVLYNSASFSTFKCYGVNGT
KLNDLCFTNVYADSFVIRGDEVRQIAPGQTGKIADYNYKLPDDFTGCVIAWNSNNLD
SKVGGNYNYLYRLFRKSNLKPFERDINTTIYQAGSTPCNGVEGFNCYFPLQSYGFQPT
NGVGYQPYRVVVLSFELNHAPATVCGPKKSTNLVKNKCVNFNFNGLTGTGVLTESN
KKFLPFQQFGRDIADTTDAVRDPQTLEILDITPCSFGGVSVITPGTNTSNQVAVLYQD
VNCTEVPVAIHADQLTPTWRVYSTGSNVFQTRAGCLIGAEHVNNSYECDIPIGAGICA
SYQTQTNSPRRRRSVASQSIIAYTMSLGAENSVAYSNNSIAIPTNFTISCTTEILPVSMT
KTSCDCTMYICGDSTECSNLLLQYGSFCTQLNRALTGIAVEQDKNTQEVFAQVKQIY
KTPPIKDFGGFNFSQILPDPSRRRRSFIEDLLFNKVTLADAGFIKQYGDCLGDIAARDLI
CAQKFNGCTVLPPLLTDEMIAQYTSALLAGTITSGWTFGAGAALQIPFAMQMAYRFN
GIGVTQNVLYENQKLIANQFNSAIGKIQDSLSSTASALGKLQDVVNQNAQALNTLVK
QLSSNFGAISSGPNDILSRLPKVEAEVQIDRLITGRLQSLQTYVTQQLIRAAEIRASANL
AATKMSECVLGQSKRVDFCGKGYHLMSFPQSAPHGVVFLHCTYVPAQEKNFTTAPA
ICHDGKAHFPREGVFVSNGTHWFVTQRNFYEPQIITTDNTFVSGNCDVVIGIVNNTVY
DPLQPELDSFKEELDKYFKNHTSPDVDLGDISGINASVVNIQKEIDRLNEVAKNLNES
LIDLQELGKYEQYIKWPWSGRRRRRRGSGGSGSGYIPEAPRDGQAYVRKDGEWVLL
STFLG** (SEQ ID NO: 160)

[0128] In some embodiments therefore, the expressible nucleic acid sequence comprised in the composition of the disclosure comprises at least about 70%, 75%, 80%, 85%, 86%, 87%, 88%, 89%, 90%, 91%, 92%, 93%, 94%, 95%, 96%, 97%, 98% or 99% sequence identity to SEQ ID NO: 68, SEQ ID NO: 69, SEQ ID NO: 71, SEQ ID NO: 72, SEQ ID NO: 74, SEQ ID NO: 75, SEQ ID NO: 77, SEQ ID NO: 78, SEQ ID NO: 80, SEQ ID NO: 81, SEQ ID NO: 83, SEQ ID NO: 84, SEQ ID NO: 86, SEQ ID NO: 87, SEQ ID NO: 89, SEQ ID NO: 90, SEQ ID NO: 92, SEQ ID NO: 93, SEQ ID NO: 95, SEQ ID NO: 96, SEQ ID NO: 98, SEQ ID NO: 99, SEQ ID NO: 101, SEQ ID NO: 102, SEQ ID NO: 104, SEQ ID NO: 105, SEQ ID NO: 107, SEQ ID NO: 108, SEQ ID NO: 110, SEQ ID NO: 111, SEQ ID NO: 113, SEQ ID NO: 114, SEQ ID NO: 116, SEQ ID NO: 117, SEQ ID NO: 119, SEQ ID NO: 120, SEQ ID NO: 122, SEQ ID NO: 123, SEQ ID NO: 125, SEQ ID NO: 126, SEQ ID NO: 128, SEQ ID NO: 129, SEQ ID NO: 131, SEQ ID NO: 132, SEQ ID NO: 134, SEQ ID NO: 135, SEQ ID NO: 137, SEQ ID NO: 138, SEQ ID NO: 140, SEQ ID NO: 141, SEQ ID NO: 143, SEQ ID NO: 144, SEQ ID NO: 146, SEQ ID NO: 147, SEQ ID NO: 149, SEQ ID NO: 150, SEQ ID NO: 152, SEQ ID NO: 153, SEQ ID NO: 155, SEQ ID NO: 156, SEQ ID NO: 158 or SEQ ID NO: 159, or a functional fragment or variant thereof. In some embodiments, the expressible nucleic acid sequence comprises the nucleic acid sequence of SEQ ID NO: 68, SEQ ID NO: 69, SEQ ID NO: 71, SEQ ID NO: 72, SEQ ID NO: 74, SEQ ID NO: 75, SEQ ID NO: 77, SEQ ID NO: 78, SEQ ID NO: 80, SEQ ID NO: 81, SEQ ID NO: 83, SEQ ID NO: 84, SEQ ID NO: 86, SEQ ID NO: 87, SEQ ID NO: 89, SEQ ID NO: 90, SEQ ID NO: 92, SEQ ID NO: 93, SEQ ID NO: 95, SEQ ID NO: 96, SEQ ID NO: 98, SEQ ID NO: 99, SEQ ID NO: 101, SEQ ID NO: 102, SEQ ID NO: 104, SEQ ID NO: 105, SEQ ID NO: 107, SEQ ID NO: 108, SEQ ID NO: 110, SEQ ID NO: 111, SEQ ID NO: 113, SEQ ID NO: 114, SEQ ID NO: 116, SEQ ID NO: 117, SEQ ID NO: 119, SEQ ID NO: 120, SEQ ID NO: 122, SEQ ID NO: 123, SEQ ID NO: 125, SEQ ID NO: 126, SEQ ID NO: 128, SEQ ID NO: 129, SEQ ID NO: 131, SEQ ID NO: 132, SEQ ID NO: 134, SEQ ID NO: 135, SEQ ID NO: 137, SEQ ID NO: 138, SEQ ID NO: 140, SEQ ID NO: 141, SEQ ID NO: 143, SEQ ID NO: 144, SEQ ID NO: 146, SEQ ID NO: 147, SEQ ID NO: 149, SEQ ID NO: 150, SEQ ID NO: 152, SEQ ID NO: 153, SEQ ID NO: 155, SEQ ID NO: 156, SEQ ID NO: 158 or SEQ ID NO: 159, or a functional fragment or variant thereof. In some embodiments, the expressible nucleic acid sequence comprised in the composition of the disclosure encodes a polypeptide comprising at least about 70%, 75%, 80%, 85%, 86%, 87%, 88%, 89%, 90%, 91%, 92%, 93%, 94%, 95%, 96%, 97%, 98% or 99% sequence identity to SEQ ID NO: 70, SEQ ID NO: 73, SEQ ID NO: 76, SEQ ID NO: 79, SEQ ID NO: 82, SEQ ID NO: 85, SEQ ID NO: 88, SEQ ID NO: 91, SEQ ID NO: 94, SEQ ID NO: 97, SEQ ID NO: 100, SEQ ID NO: 103, SEQ ID NO: 106, SEQ ID NO: 109, SEQ ID NO: 112, SEQ ID NO: 115, SEQ ID NO: 118, SEQ ID NO: 121, SEQ ID NO: 124, SEQ ID NO: 127, SEQ ID NO: 130, SEQ ID NO: 133, SEQ ID NO: 136, SEQ ID NO: 139, SEQ ID NO: 142, SEQ ID NO: 145, SEQ ID NO: 148, SEQ ID NO: 151, SEQ ID NO: 154, SEQ ID NO: 157 or SEQ ID NO: 160, or a functional fragment or variant thereof. In some embodiments, the expressible nucleic acid sequence encodes a polypeptide comprising the amino acid sequence of SEQ ID NO: 70, SEQ ID NO: 73, SEQ ID NO: 76, SEQ ID NO: 79, SEQ ID NO: 82, SEQ ID NO: 85, SEQ ID NO: 88, SEQ ID NO: 91, SEQ ID NO: 94, SEQ ID NO: 97, SEQ ID NO: 100, SEQ ID NO: 103, SEQ ID NO: 106, SEQ ID NO: 109, SEQ ID NO: 112, SEQ ID NO: 115, SEQ ID NO: 118, SEQ ID NO: 121, SEQ ID NO: 124, SEQ ID NO: 127, SEQ ID NO: 130, SEQ ID NO: 133, SEQ ID NO: 136, SEQ ID NO: 139, SEQ ID NO: 142, SEQ ID NO: 145, SEQ ID NO: 148, SEQ ID NO: 151, SEQ ID NO: 154, SEQ ID NO: 157 or SEQ ID NO: 160, or a functional fragment or variant thereof.

### B. Nucleic Acid Molecule

[0129] In one aspect, the present disclosure also relates to a nucleic acid molecule that comprises any of the disclosed expressible nucleic acid sequences. In some embodiments, the nucleic acid molecule comprising one or a plurality of the disclosed expressible nucleic acid sequences is in form of a messanger RNA. In some embodiments, the nucleic acid molecule comprising one or a plurality of the disclosed expressible nucleic acid sequences is in form of a DNA. In some embodiments, the expressible nucleic acid sequence disclosed herein can be part of a plasmid and thus the nucleic acid molecule is a plasmid comprising such an expressible nucleic acid sequence. In some embodiments, provided herein is a vector or plasmid that is capable of expressing at least a monomer of a self-assembling nanoparticle and a viral antigen construct or constructs in the cell of a mammal in a quantity effective to elicit an immune response in the mammal. The vector or plasmid may comprise heterologous nucleic acid encoding the one or more viral antigens (such as SARS-CoV-2 antigens). In some embodiments, provided herein is a vector or plasmid that is capable of expressing at least one soluble trimer of a coronavirus or SARS-CoV-2 envelope polypeptide or constructs in the cell of a mammal in a quantity effective to elicit an immune response in the mammal. In some embodiments, the nucleic acid expresses a trimer of the spike protein of SARS-CoV-2 or a functional fragment or variant thereof. The vector may be a plasmid. The plasmid may be useful for transfecting cells with nucleic acid encoding a viral antigen, which the transformed host cell is cultured and maintained under conditions wherein expression of the viral antigen takes place and wherein the structure of the nanoparticle with the antigen or trimer elicits an immune response of a magnitude greater than and/or more therapeutically effective than the immune repsonse elicited by the antigen alone. The plasmid may further comprise an initiation codon, which may be upstream of the expressible sequence, and a stop codon, which may be downstream of the coding sequence. The initiation and termination codon may be in frame with the expressible sequence.

[0130] The plasmid may also comprise a promoter that is operably linked to the coding sequence. The promoter operably linked to the coding sequence may be a promoter from simian virus 40 (SV40), a mouse mammary tumor virus (MMTV) promoter, a human immunodeficiency virus (HIV) promoter such as the bovine immunodeficiency virus (BIV) long terminal repeat (LTR) promoter, a Moloney virus promoter, an avian leukosis virus (ALV) promoter, a cytomegalovirus (CMV) promoter such as the CMV immediate early promoter, Epstein Barr virus (EBV) promoter, or a Rous sarcoma virus (RSV) promoter. The promoter may also be a promoter from a human gene such as human actin, human myosin, human hemoglobin, human muscle creatine, or human metalothionein. The promoter may also be a tissue specific promoter, such as a muscle or skin specific promoter, natural or synthetic. Examples of such promoters are described in US patent application publication No. US20040175727, the contents of which are incorporated herein in its entirety. The plasmid may also comprise a polyadenylation signal, which may be downstream of the coding sequence. The polyadenylation signal may be a SV40 polyadenylation signal, LTR polyadenylation signal, bovine growth hormone (bGH) polyadenylation signal, human growth hormone (hGH) polyadenylation signal, or human β-globin polyadenylation signal. The SV40 polyadenylation signal may be a polyadenylation signal from a pCEP4 plasmid (Invitrogen, San Diego, Calif.).

[0131] The plasmid may also comprise an enhancer upstream of the coding sequence. The enhancer may be human actin, human myosin, human hemoglobin, human muscle creatine or a viral enhancer such as one from CMV, FMDV, RSV or EBV. Polynucleotide function enhancers are described in U.S. Pat. Nos. 5,593,972, 5,962,428, and WO94/016737, the contents of each are fully incorporated by reference. The plasmid may also comprise a mammalian origin of replication in order to maintain the plasmid extrachromosomally and produce multiple copies of the plasmid in a cell. The plasmid may be pVAX1, pCEP4 or pREP4 from ThermoFisher Scientific (San Diego, Calif.), which may comprise the Epstein Barr virus origin of replication and nuclear antigen EBNA-1 coding region, which may produce high copy episomal replication without integration.

[0132] In some embodiments, the vector can be pVAX1 or a pVax1 variant with changes such as the variant plasmid described herein. The variant pVax1 plasmid is a 2998 basepair variant of the backbone vector plasmid pVAX1 (Invitrogen, Carlsbad Calif.). The CMV promoter is located at bases 137-724. The T7 promoter/priming site is at bases 664-683. Multiple cloning sites are at bases 696-811. Bovine GH polyadenylation signal is at bases 829-1053. The Kanamycin resistance gene is at bases 1226-2020. The pUC origin is at bases 2320-2993. The vaccine may comprise the consensus antigens and plasmids at quantities of from about 1 nanogram to 100 milligrams; about 1 microgram to about 10 milligrams; or preferably about 0.1 microgram to about 10 milligrams; or more preferably about 1 milligram to about 2 milligram. In some embodiments, pharmaceutical compositions according to the present disclosure comprise from about 1 nanogram to about 1000 micrograms of DNA. The nucleic acid sequence for the pVAX1 backbone sequence is as follows:

(SEQ ID NO: 161)
gactcttcgcgatgtacgggccagatatacgcgttgacat
tgattattgactagttattaatagtaatcaattacggggt
cattagttcatagcccatatatggagttccgcgttacata
acttacggtaaatggcccgcctggctgaccgcccaacgac
ccccgcccattgacgtcaataatgacgtatgttcccatag
taacgccaatagggactttccattgacgtcaatgggtgga
ctatttacggtaaactgcccacttggcagtacatcaagtg
tatcatatgccaagtacgccccctattgacgtcaatgacg
gtaaatggcccgcctggcattatgcccagtacatgacctt
atgggactttcctacttggcagtacatctacgtattagtc
atcgctattaccatggtgatgcggttttggcagtacatca
atgggcgtggatagcggtttgactcacggggatttccaag
tctccaccccattgacgtcaatgggagtttgttttggcac
caaaatcaacgggactttccaaaatgtcgtaacaactccg
ccccattgacgcaaatgggcggtaggcgtgtacggtggga
ggtctatataagcagagctctctggctaactagagaaccc
actgcttactggcttatcgaaattaatacgactcactata
gggagacccaagctggctagcgtttaaacttaagcttggt
accgagctcggatccactagtccagtgtggtggaattctg
cagatatccagcacagtggcggccgctcgagtctagaggg
cccgtttaaacccgctgatcagcctcgactgtgccttcta
gttgccagccatctgttgtttgcccctcccccgtgccttc
cttgaccctggaaggtgccactcccactgtcctttcctaa
taaaatgaggaaattgcatcgcattgtctgagtaggtgtc
attctattctggggggtggggtggggcaggacagcaaggg
ggaggattgggaagacaatagcaggcatgctggggatgcg
gtgggctctatggcttctactgggcggttttatggacagc
aagcgaaccggaattgccagctggggcgccctctggtaag
gttgggaagccctgcaaagtaaactggatggctttctcgc
cgccaaggatctgatggcgcaggggatcaagctctgatca
agagacaggatgaggatcgtttcgcatgattgaacaagat
ggattgcacgcaggttctccggccgcttgggtggagaggc
tattcggctatgactgggcacaacagacaatcggctgctc
tgatgccgccgtgttccggctgtcagcgcaggggcgcccg
gttctttttgtcaagaccgacctgtccggtgccctgaatg
aactgcaagacgaggcagcgcggctatcgtggctggccac
gacgggcgttccttgcgcagctgtgctcgacgttgtcact
gaagcgggaagggactggctgctattgggcgaagtgccgg
ggcaggatctcctgtcatctcaccttgctcctgccgagaa
agtatccatcatggctgatgcaatgcggcggctgcatacg
cttgatccggctacctgcccattcgaccaccaagcgaaac
atcgcatcgagcgagcacgtactcggatggaagccggtct
tgtcgatcaggatgatctggacgaagagcatcaggggctc
gcgccagccgaactgttcgccaggctcaaggcgagcatgc
ccgacggcgaggatctcgtcgtgacccatggcgatgcctg
cttgccgaatatcatggtggaaaatggccgcttttctgga
ttcatcgactgtggccggctgggtgtggcggaccgctatc
aggacatagcgttggctacccgtgatattgctgaagagct
tggcggcgaatgggctgaccgcttcctcgtgctttacggt
atcgccgctcccgattcgcagcgcatcgccttctatcgcc
ttcttgacgagttcttctgaattattaacgcttacaattt
cctgatgcggtattttctccttacgcatctgtgcggtatt
tcacaccgcatacaggtggcacttttcggggaaatgtgcg
cggaacccctatttgtttatttttctaaatacattcaaat
atgtatccgctcatgagacaataaccctgataaatgcttc
aataatagcacgtgctaaaacttcatttttaatttaaaag
gatctaggtgaagatcctttttgataatctcatgaccaaa
atcccttaacgtgagttttcgttccactgagcgtcagacc
ccgtagaaaagatcaaaggatcttcttgagatcctttttt
tctgcgcgtaatctgctgcttgcaaacaaaaaaaccaccg
ctaccagcggtggtttgtttgccggatcaagagctaccaa
ctctttttccgaaggtaactggcttcagcagagcgcagat
accaaatactgtccttctagtgtagccgtagttaggccac
cacttcaagaactctgtagcaccgcctacatacctcgctc
tgctaatcctgttaccagtggctgctgccagtggcgataa
gtcgtgtcttaccgggttggactcaagacgatagttaccg
gataaggcgcagcggtcgggctgaacggggggttcgtgca
cacagcccagcttggagcgaacgacctacaccgaactgag
atacctacagcgtgagctatgagaaagcgccacgcttccc
gaagggagaaaggcggacaggtatccggtaagcggcaggg
tcggaacaggagagcgcacgagggagcttccagggggaaa
cgcctggtatctttatagtcctgtcgggtttcgccacctc
tgacttgagcgtcgatttttgtgatgctcgtcaggggggc
ggagcctatggaaaaacgccagcaacgcggcctttttacg
gttcctgggcttttgctggccttttgctcacatgttctt

[0133] Other vectors or plasmids that can be used herein to produce the vaccine of the present disclosure include, but not limited to, pcDNA3.1(+), pCI mammalian expression vector, pSI vector, pZeoSV2(+), phCMV1, pTCP and pIRES with their respective backbone sequence as follows.

[0134] The pcDNA3.1(+) backbone sequence (SEQ ID NO: 162):

gacggatcgggagatctcccgatcccctatggtgcactct
cagtacaatctgctctgatgccgcatagttaagccagtat
ctgctccctgcttgtgtgttggaggtcgctgagtagtgcg
cgagcaaaatttaagctacaacaaggcaaggcttgaccga
caattgcatgaagaatctgcttagggttaggcgttttgcg
ctgcttcgcgatgtacgggccagatatacgcgttgacatt
gattattgactagttattaatagtaatcaattacggggtc
attagttcatagcccatatatggagttccgcgttacataa
cttacggtaaatggcccgcctggctgaccgcccaacgacc
cccgcccattgacgtcaataatgacgtatgttcccatagt
aacgccaatagggactttccattgacgtcaatgggtggag
tatttacggtaaactgcccacttggcagtacatcaagtgt
atcatatgccaagtacgccccctattgacgtcaatgacgg
taaatggcccgcctggcattatgcccagtacatgacctta
tgggactttcctacttggcagtacatctacgtattagtca
tcgctattaccatggtgatgcggttttggcagtacatcaa
tgggcgtggatagcggtttgactcacggggatttccaagt
ctccaccccattgacgtcaatgggagtttgttttggcacc
aaaatcaacgggactttccaaaatgtcgtaacaactccgc
cccattgacgcaaatgggcggtaggcgtgtacggtgggag
gtctatataagcagagctctctggctaactagagaaccca
ctgcttactggcttatcgaaattaatacgactcactatag
ggagacccaagctggctagcgtttaaacttaagcttggta
ccgagctcggatccactagtccagtgtggtggaattctgc
agatatccagcacagtggcggccgctcgagtctagagggc
ccgtttaaacccgctgatcagcctcgactgtgccttctag
ttgccagccatctgttgtttgcccctcccccgtgccttcc
ttgaccctggaaggtgccactcccactgtcctttcctaat
aaaatgaggaaattgcatcgcattgtctgagtaggtgtca
ttctattctggggggtggggtggggcaggacagcaagggg
gaggattgggaagacaatagcaggcatgctggggatgcgg
tgggctctatggcttctgaggcggaaagaaccagctgggg
ctctagggggtatccccacgcgccctgtagcggcgcatta
agcgcggcgggtgtggtggttacgcgcagcgtgaccgcta
cacttgccagcgccctagcgcccgctcctttcgctttctt
cccttcctttctcgccacgttcgccggctttccccgtcaa
gctctaaatcgggggctccctttagggttccgatttagtg
ctttacggcacctcgaccccaaaaaacttgattagggtga
tggttcacgtagtgggccatcgccctgatagacggttttt
cgccctttgacgttggagtccacgttctttaatagtggac
tcttgttccaaactggaacaacactcaaccctatctcggt
ctattcttttgatttataagggattttgccgatttcggcc
tattggttaaaaaatgagctgatttaacaaaaatttaacg
cgaattaattctgtggaatgtgtgtcagttagggtgtgga
aagtccccaggctccccagcaggcagaagtatgcaaagca
tgcatctcaattagtcagcaaccaggtgtggaaagtcccc
aggctccccagcaggcagaagtatgcaaagcatgcatctc
aattagtcagcaaccatagtcccgcccctaactccgccca
tcccgcccctaactccgcccagttccgcccattctccgcc
ccatggctgactaattttttttatttatgcagaggccgag
gccgcctctgcctctgagctattccagaagtagtgaggag
gcttttttggaggcctaggcttttgcaaaaagctcccggg
agcttgtatatccattttcggatctgatcaagagacagga
tgaggatcgtttcgcatgattgaacaagatggattgcacg
caggttctccggccgcttgggtggagaggctattcggcta
tgactgggcacaacagacaatcggctgctctgatgccgcc
gtgttccggctgtcagcgcaggggcgcccggttctttttg
tcaagaccgacctgtccggtgccctgaatgaactgcagga
cgaggcagcgcggctatcgtggctggccacgacgggcgtt
ccttgcgcagctgtgctcgacgttgtcactgaagcgggaa
gggactggctgctattgggcgaagtgccggggcaggatct
cctgtcatctcaccttgctcctgccgagaaagtatccatc
atggctgatgcaatgcggcggctgcatacgcttgatccgg
ctacctgcccattcgaccaccaagcgaaacatcgcatcga
gcgagcacgtactcggatggaagccggtcttgtcgatcag
gatgatctggacgaagagcatcaggggctcgcgccagccg
aactgttcgccaggctcaaggcgcgcatgcccgacggcga
ggatctcgtcgtgacccatggcgatgcctgcttgccgaat
atcatggtggaaaatggccgcttttctggattcatcgact
gtggccggctgggtgtggcggaccgctatcaggacatagc
gttggctacccgtgatattgctgaagagcttggcggcgaa
tgggctgaccgcttcctcgtgctttacggtatcgccgctc
ccgattcgcagcgcatcgccttctatcgccttcttgacga
gttcttctgagcgggactctggggttcgaaatgaccgacc
aagcgacgcccaacctgccatcacgagatttcgattccac
cgccgccttctatgaaaggttgggcttcggaatcgttttc
cgggacgccggctggatgatcctccagcgcggggatctca
tgctggagttcttcgcccaccccaacttgtttattgcagc
ttataatggttacaaataaagcaatagcatcacaaatttc
acaaataaagcatttttttcactgcattctagttgtggtt
tgtccaaactcatcaatgtatcttatcatgtctgtatacc
gtcgacctctagctagagcttggcgtaatcatggtcatag
ctgtttcctgtgtgaaattgttatccgctcacaattccac
acaacatacgagccggaagcataaagtgtaaagcctgggg
tgcctaatgagtgagctaactcacattaattgcgttgcgc
tcactgcccgctttccagtcgggaaacctgtcgtgccagc
tgcattaatgaatcggccaacgcgcggggagaggcggttt
gcgtattgggcgctcttccgcttcctcgctcactgactcg
ctgcgctcggtcgttcggctgcggcgagcggtatcagctc
actcaaaggcggtaatacggttatccacagaatcagggga
taacgcaggaaagaacatgtgagcaaaaggccagcaaaag
gccaggaaccgtaaaaaggccgcgttgctggcgtttttcc
ataggctccgcccccctgacgagcatcacaaaaatcgacg
ctcaagtcagaggtggcgaaacccgacaggactataaaga
taccaggcgtttccccctggaagctccctcgtgcgctctc
ctgttccgaccctgccgcttaccggatacctgtccgcctt
tctcccttcgggaagcgtggcgctttctcatagctcacgc
tgtaggtatctcagttcggtgtaggtcgttcgctccaagc
tgggctgtgtgcacgaaccccccgttcagcccgaccgctg
cgccttatccggtaactatcgtcttgagtccaacccggta
agacacgacttatcgccactggcagcagccactggtaaca
ggattagcagagcgaggtatgtaggcggtgctacagagtt
cttgaagtggtggcctaactacggctacactagaagaaca
gtatttggtatctgcgctctgctgaagccagttaccttcg
gaaaaagagttggtagctcttgatccggcaaacaaaccac
cgctggtagcggtttttttgtttgcaagcagcagattacg
cgcagaaaaaaaggatctcaagaagatcctttgatctttt
ctacggggtctgacgctcagtggaacgaaaactcacgtta
agggattttggtcatgagattatcaaaaaggatcttcacc
tagatccttttaaattaaaaatgaagttttaaatcaatct
aaagtatatatgagtaaacttggtctgacagttaccaatg
cttaatcagtgaggcacctatctcagcgatctgtctattt
cgttcatccatagttgcctgactccccgtcgtgtagataa
ctacgatacgggagggcttaccatctggccccagtgctgc
aatgataccgcgagacccacgctcaccggctccagattta
tcagcaataaaccagccagccggaagggccgagcgcagaa
gtggtcctgcaactttatccgcctccatccagtctattaa
ttgttgccgggaagctagagtaagtagttcgccagttaat
agtttgcgcaacgttgttgccattgctacaggcatcgtgg
tgtcacgctcgtcgtttggtatggcttcattcagctccgg
ttcccaacgatcaaggcgagttacatgatcccccatgttg
tgcaaaaaagcggttagctccttcggtcctccgatcgttg
tcagaagtaagttggccgcagtgttatcactcatggttat
ggcagcactgcataattctcttactgtcatgccatccgta
agatgcttttctgtgactggtgagtactcaaccaagtcat
tctgagaatagtgtatgcggcgaccgagttgctcttgccc
ggcgtcaatacgggataataccgcgccacatagcagaact
ttaaaagtgctcatcattggaaaacgttcttcggggcgaa
aactctcaaggatcttaccgctgttgagatccagttcgat
gtaacccactcgtgcacccaactgatcttcagcatctttt
actttcaccagcgtttctgggtgagcaaaaacaggaaggc
aaaatgccgcaaaaaagggaataagggcgacacggaaatg
ttgaatactcatactcttcctttttcaatattattgaagc
atttatcagggttattgtctcatgagcggatacatatttg
aatgtatttagaaaaataaacaaataggggttccgcgcac
atttccccgaaaagtgccacctgacgtc

[0135] The pCI mammalian expression vector backbone sequence (SEQ ID NO: 163):

tcaatattggccattagccatattattcattggttatata
gcataaatcaatattggctattggccattgcatacgttgt
atctatatcataatatgtacatttatattggctcatgtcc
aatatgaccgccatgttggcattgattattgactagttat
taatagtaatcaattacggggtcattagttcatagcccat
atatggagttccgcgttacataacttacggtaaatggccc
gcctggctgaccgcccaacgacccccgcccattgacgtca
ataatgacgtatgttcccatagtaacgccaatagggactt
tccattgacgtcaatgggtggagtatttacggtaaactgc
ccacttggcagtacatcaagtgtatcatatgccaagtccg
ccccctattgacgtcaatgacggtaaatggcccgcctggc
attatgcccagtacatgaccttacgggactttcctacttg
gcagtacatctacgtattagtcatcgctattaccatggtg
atgcggttttggcagtacaccaatgggcgtggatagcggt
ttgactcacggggatttccaagtctccaccccattgacgt
caatgggagtttgttttggcaccaaaatcaacgggacttt
ccaaaatgtcgtaataaccccgccccgttgacgcaaatgg
gcggtaggcgtgtacggtgggaggtctatataagcagagc
tcgtttagtgaaccgtcagatcactagaagctttattgcg
gtagtttatcacagttaaattgctaacgcagtcagtgctt
ctgacacaacagtctcgaacttaagctgcagaagttggtc
gtgaggcactgggcaggtaagtatcaaggttacaagacag
gtttaaggagaccaatagaaactgggcttgtcgagacaga
gaagactcttgcgtttctgataggcacctattggtcttac
tgacatccactttgcctttctctccacaggtgtccactcc
cagttcaattacagctcttaaggctagagtacttaatacg
actcactataggctagcctcgagaattcacgcgtggtacc
tctagagtcgacccgggcggccgcttcgagcagacatgat
aagatacattgatgagtttggacaaaccacaactagaatg
cagtgaaaaaaatgctttatttgtgaaatttgtgatgcta
ttgctttatttgtaaccattataagctgcaataaacaagt
taacaacaacaattgcattcattttatgtttcaggttcag
ggggagatgtgggaggttttttaaagcaagtaaaacctct
acaaatgtggtaaaatcgataaggatccgggctggcgtaa
tagcgaagaggcccgcaccgatcgcccttcccaacagttg
cgcagcctgaatggcgaatggacgcgccctgtagcggcgc
attaagcgcggcgggtgtggtggttacgcgcagcgtgacc
gctacacttgccagcgccctagcgcccgctcctttcgctt
tcttcccttcctttctcgccacgttcgccggctttccccg
tcaagctctaaatcgggggctccctttagggttccgattt
agtgctttacggcacctcgaccccaaaaaacttgattagg
gtgatggttcacgtagtgggccatcgccctgatagacggt
ttttcgccctttgacgttggagtccacgttctttaatagt
ggactcttgttccaaactggaacaacactcaaccctatct
cggtctattcttttgatttataagggattttgccgatttc
ggcctattggttaaaaaatgagctgatttaacaaaaattt
aacgcgaattttaacaaaatattaacgcttacaatttcct
gatgcggtattttctccttacgcatctgtgcggtatttca
caccgcatatggtgcactctcagtacaatctgctctgatg
ccgcatagttaagccagccccgacacccgccaacacccgc
tgacgcgccctgacgggcttgtctgctcccggcatccgct
tacagacaagctgtgaccgtctccgggagctgcatgtgtc
agaggttttcaccgtcatcaccgaaacgcgcgagacgaaa
gggcctcgtgatacgcctatttttataggttaatgtcatg
ataataatggtttcttagacgtcaggtggcacttttcggg
gaaatgtgcgcggaacccctatttgtttatttttctaaat
acattcaaatatgtatccgctcatgagacaataaccctga
taaatgcttcaataatattgaaaaaggaagagtatgagta
ttcaacatttccgtgtcgcccttattcccttttttgcggc
attttgccttcctgtttttgctcacccagaaacgctggtg
aaagtaaaagatgctgaagatcagttgggtgcacgagtgg
gttacatcgaactggatctcaacagcggtaagatccttga
gagttttcgccccgaagaacgttttccaatgatgagcact
tttaaagttctgctatgtggcgcggtattatcccgtattg
acgccgggcaagagcaactcggtcgccgcatacactattc
tcagaatgacttggttgagtactcaccagtcacagaaaag
catcttacggatggcatgacagtaagagaattatgcagtg
ctgccataaccatgagtgataacactgcggccaacttact
tctgacaacgatcggaggaccgaaggagctaaccgctttt
ttgcacaacatgggggatcatgtaactcgccttgatcgtt
gggaaccggagctgaatgaagccataccaaacgacgagcg
tgacaccacgatgcctgtagcaatggcaacaacgttgcgc
aaactattaactggcgaactacttactctagcttcccggc
aacaattaatagactggatggaggcggataaagttgcagg
accacttctgcgctcggcccttccggctggctggtttatt
gctgataaatctggagccggtgagcgtgggtctcgcggta
tcattgcagcactggggccagatggtaagccctcccgtat
cgtagttatctacacgacggggagtcaggcaactatggat
gaacgaaatagacagatcgctgagataggtgcctcactga
ttaagcattggtaactgtcagaccaagtttactcatatat
actttagattgatttaaaacttcatttttaatttaaaagg
atctaggtgaagatcctttttgataatctcatgaccaaaa
tcccttaacgtgagttttcgttccactgagcgtcagaccc
cgtagaaaagatcaaaggatcttcttgagatccttttttt
ctgcgcgtaatctgctgcttgcaaacaaaaaaaccaccgc
taccagcggtggtttgtttgccggatcaagagctaccaac
tctttttccgaaggtaactggcttcagcagagcgcagata
ccaaatactgttcttctagtgtagccgtagttaggccacc
acttcaagaactctgtagcaccgcctacatacctcgctct
gctaatcctgttaccagtggctgctgccagtggcgataag
tcgtgtcttaccgggttggactcaagacgatagttaccgg
ataaggcgcagcggtcgggctgaacggggggttcgtgcac
acagcccagcttggagcgaacgacctacaccgaactgaga
tacctacagcgtgagctatgagaaagcgccacgcttcccg
aagggagaaaggcggacaggtatccggtaagcggcagggt
cggaacaggagagcgcacgagggagcttccagggggaaac
gcctggtatctttatagtcctgtcgggtttcgccacctct
gacttgagcgtcgatttttgtgatgctcgtcaggggggcg
gagcctatggaaaaacgccagcaacgcggcctttttacgg
ttcctggccttttgctggccttttgctcacatggctcgac
agatct

[0136] The pSI vector backbone sequence (SEQ ID NO: 164):

gcgcagcaccatggcctgaaataacctctgaaagaggaac
ttggttaggtaccttctgaggcggaaagaaccagctgtgg
aatgtgtgtcagttagggtgtggaaagtccccaggctccc
cagcaggcagaagtatgcaaagcatgcatctcaattagtc
agcaaccaggtgtggaaagtccccaggctccccagcaggc
agaagtatgcaaagcatgcatctcaattagtcagcaacca
tagtcccgcccctaactccgcccatcccgcccctaactcc
gcccagttccgcccattctccgccccatggctgactaatt
ttttttatttatgcagaggccgaggccgcctcggcctctg
agctattccagaagtagtgaggaggcttttttggaggcct
aggcttttgcaaaaagcttgattcttctgacacaacagtc
tcgaacttaagctgcagaagttggtcgtgaggcactgggc
aggtaagtatcaaggttacaagacaggtttaaggagacca
atagaaactgggcttgtcgagacagagaagactcttgcgt
ttctgataggcacctattggtcttactgacatccactttg
cctttctctccacaggtgtccactcccagttcaattacag
ctcttaaggctagagtacttaatacgactcactataggct
agcctcgagaattcacgcgtggtacctctagagtcgaccc
gggcggccgcttcgagcagacatgataagatacattgatg
agtttggacaaaccacaactagaatgcagtgaaaaaaatg
ctttatttgtgaaatttgtgatgctattgctttatttgta
accattataagctgcaataaacaagttaacaacaacaatt
gcattcattttatgtttcaggttcagggggaggtgtggga
ggttttttaaagcaagtaaaacctctacaaatgtggtaaa
atcgataaggatccgggctggcgtaatagcgaagaggccc
gcaccgatcgcccttcccaacagttgcgcagcctgaatgg
cgaatggacgcgccctgtagcggcgcattaagcgcggcgg
gtgtggtggttacgcgcagcgtgaccgctacacttgccag
cgccctagcgcccgctcctttcgctttcttcccttccttt
ctcgccacgttcgccggctttccccgtcaagctctaaatc
gggggctccctttagggttccgatttagtgctttacggca
cctcgaccccaaaaaacttgattagggtgatggttcacgt
agtgggccatcgccctgatagacggtttttcgccctttga
cgttggagtccacgttctttaatagtggactcttgttcca
aactggaacaacactcaaccctatctcggtctattctttt
gatttataagggattttgccgatttcggcctattggttaa
aaaatgagctgatttaacaaaaatttaacgcgaattttaa
caaaatattaacgcttacaatttcctgatgcggtattttc
tccttacgcatctgtgcggtatttcacaccgcatatggtg
cactctcagtacaatctgctctgatgccgcatagttaagc
cagccccgacacccgccaacacccgctgacgcgccctgac
gggcttgtctgctcccggcatccgcttacagacaagctgt
gaccgtctccgggagctgcatgtgtcagaggttttcaccg
tcatcaccgaaacgcgcgagacgaaagggcctcgtgatac
gcctatttttataggttaatgtcatgataataatggtttc
ttagacgtcaggtggcacttttcggggaaatgtgcgcgga
acccctatttgtttatttttctaaatacattcaaatatgt
atccgctcatgagacaataaccctgataaatgcttcaata
atattgaaaaaggaagagtatgagtattcaacatttccgt
gtcgcccttattcccttttttgcggcattttgccttcctg
tttttgctcacccagaaacgctggtgaaagtaaaagatgc
tgaagatcagttgggtgcacgagtgggttacatcgaactg
gatctcaacagcggtaagatccttgagagttttcgccccg
aagaacgttttccaatgatgagcacttttaaagttctgct
atgtggcgcggtattatcccgtattgacgccgggcaagag
caactcggtcgccgcatacactattctcagaatgacttgg
ttgagtactcaccagtcacagaaaagcatcttacggatgg
catgacagtaagagaattatgcagtgctgccataaccatg
agtgataacactgcggccaacttacttctgacaacgatcg
gaggaccgaaggagctaaccgcttttttgcacaacatggg
ggatcatgtaactcgccttgatcgttgggaaccggagctg
aatgaagccataccaaacgacgagcgtgacaccacgatgc
ctgtagcaatggcaacaacgttgcgcaaactattaactgg
cgaactacttactctagcttcccggcaacaattaatagac
tggatggaggcggataaagttgcaggaccacttctgcgct
cggcccttccggctggctggtttattgctgataaatctgg
agccggtgagcgtgggtctcgcggtatcattgcagcactg
gggccagatggtaagccctcccgtatcgtagttatctaca
cgacggggagtcaggcaactatggatgaacgaaatagaca
gatcgctgagataggtgcctcactgattaagcattggtaa
ctgtcagaccaagtttactcatatatactttagattgatt
taaaacttcatttttaatttaaaaggatctaggtgaagat
cctttttgataatctcatgaccaaaatcccttaacgtgag
ttttcgttccactgagcgtcagaccccgtagaaaagatca
aaggatcttcttgagatcctttttttctgcgcgtaatctg
ctgcttgcaaacaaaaaaaccaccgctaccagcggtggtt
tgtttgccggatcaagagctaccaactctttttccgaagg
taactggcttcagcagagcgcagataccaaatactgttct
tctagtgtagccgtagttaggccaccacttcaagaactct
gtagcaccgcctacatacctcgctctgctaatcctgttac
cagtggctgctgccagtggcgataagtcgtgtcttaccgg
gttggactcaagacgatagttaccggataaggcgcagcgg
tcgggctgaacggggggttcgtgcacacagcccagcttgg
agcgaacgacctacaccgaactgagatacctacagcgtga
gctatgagaaagcgccacgcttcccgaagggagaaaggcg
gacaggtatccggtaagcggcagggtcggaacaggagagc
gcacgagggagcttccagggggaaacgcctggtatcttta
tagtcctgtcgggtttcgccacctctgacttgagcgtcga
tttttgtgatgctcgtcaggggggcggagcctatggaaaa
acgccagcaacgcggcctttttacggttcctggccttttg
ctggccttttgctcacatggctcgacagatct

[0137] The pZeoSV2(+) backbone sequence (SEQ ID NO: 165):

ggatcgatccggctgtggaatgtgtgtcagttagggtgtg
gaaagtccccaggctccccagcaggcagaagtatgcaaag
catgcatctcaattagtcagcaaccaggtgtggaaagtcc
ccaggctccccagcaggcagaagtatgcaaagcatgcatc
tcaattagtcagcaaccatagtcccgcccctaactccgcc
catcccgcccctaactccgcccagttccgcccattctccg
ccccatggctgactaattttttttatttatgcagaggccg
aggccgcctcggcctctgagctattccagaagtagtgagg
aggcttttttggaggcctaggcttttgcaaaaagctctct
ggctaactagagaacccactgcttactggcttatcgaaat
taatacgactcactatagggagacccaagctggctagcgt
ttaaacttaagcttggtaccgagctcggatccactagtcc
agtgtggtggaattctgcagatatccagcacagtggcggc
cgctcgagtctagagggcccgtttaaacccgctgatcagc
ctcgactgtgccttctagttgccagccatctgttgtttgc
ccctcccccgtgccttccttgaccctggaaggtgccactc
ccactgtcctttcctaataaaatgaggaaattgcatcgca
ttgtctgagtaggtgtcattctattctggggggtggggtg
gggcaggacagcaagggggaggattgggaagacaatagca
ggcatgctggggatgcggtgggctctatggcttctgaggc
ggaaagaaccagcatgtgagcaaaaggccagcaaaaggcc
aggaaccgtaaaaaggccgcgttgctggcgtttttccata
ggctccgcccccctgacgagcatcacaaaaatcgacgctc
aagtcagaggtggcgaaacccgacaggactataaagatac
caggcgtttccccctggaagctccctcgtgcgctctcctg
ttccgaccctgccgcttaccggatacctgtccgcctttct
cccttcgggaagcgtggcgctttctcatagctcacgctgt
aggtatctcagttcggtgtaggtcgttcgctccaagctgg
gctgtgtgcacgaaccccccgttcagcccgaccgctgcgc
cttatccggtaactatcgtcttgagtccaacccggtaaga
cacgacttatcgccactggcagcagccactggtaacagga
ttagcagagcgaggtatgtaggcggtgctacagagttctt
gaagtggtggcctaactacggctacactagaagaacagta
tttggtatctgcgctctgctgaagccagttaccttcggaa
aaagagttggtagctcttgatccggcaaacaaaccaccgc
tggtagcggtggtttttttgtttgcaagcagcagattacg
cgcagaaaaaaaggatctcaagaagatcctttgatctttt
ctacggggtctgacgctcagtggaacgaaaactcacgtta
agggattttggtcatgacattaacctataaaaataggcgt
atcacgaggccctttcgtctcgcgcgtttcggtgatgacg
gtgaaaacctctgacacatgcagctcccggagacggtcac
agcttgtctgtaagcggatgccgggagcagacaagcccgt
cagggcgcgtcagcgggtgttggcgggtgtcggggctggc
ttaactatgcggcatcagagcagattgtactgagagtgca
ccatatgcggtgtgaaataccgcacagatgcgtaaggaga
aaataccgcatcaggacgcgccctgtagcggcgcattaag
cgcggcgggtgtggtggttacgcgcagcgtgaccgctaca
cttgccagcgccctagcgcccgctcctttcgctttcttcc
cttcctttctcgccacgttcgccggctttccccgtcaagc
tctaaatcgggggctccctttagggttccgatttagtgct
ttacggcacctcgaccccaaaaaacttgattagggtgatg
gttcacgtagtgggccatcgccctgatagacggtttttcg
ccctttgacgttggagtccacgttctttaatagtggactc
ttgttccaaactggaacaacactcaaccctatctcggtct
attcttttgatttataagggattttgccgatttcggccta
ttggttaaaaaatgagctgatttaacaaaaatttaacgcg
aattttaacaaaatattaacgcttacaatttccattcgcc
attcaggctgaactagatctagagtccgttacataactta
cggtaaatggcccgcctggctgaccgcccaacgacccccg
cccattgacgtcaataatgacgtatgttcccatagtaacg
ccaatagggactttccattgacgtcaatgggtggagtatt
tacggtaaactgcccacttggcagtacatcaagtgtatca
tatgccaagtacgccccctattgacgtcaatgacggtaaa
tggcccgcctggcattatgcccagtacatgaccttatggg
actttcctacttggcagtacatctacgtattagtcatcgc
tattaccatggtgatgcggttttggcagtacatcaatggg
cgtggatagcggtttgactcacggggatttccaagtctcc
accccattgacgtcaatgggagtttgttttggcaccaaaa
tcaacgggactttccaaaatgtcgtaacaactccgcccca
ttgacgcaaatgggcggtaggcgtgtacggtgggaggtct
atataagcagagctcgtttagtgaaccgtcagatcgcctg
gagacgccatccacgctgttttgacctccatagaagacac
cgggaccgatccagcctccgcggccgggaacggtgcattg
gaacggaccgtgttgacaattaatcatcggcatagtatat
cggcatagtataatacgacaaggtgaggaactaaaccatg
gccaagttgaccagtgccgttccggtgctcaccgcgcgcg
acgtcgccggagcggtcgagttctggaccgaccggctcgg
gttctcccgggacttcgtggaggacgacttcgccggtgtg
gtccgggacgacgtgaccctgttcatcagcgcggtccagg
accaggtggtgccggacaacaccctggcctgggtgtgggt
gcgcggcctggacgagctgtacgccgagtggtcggaggtc
gtgtccacgaacttccgggacgcctccgggccggccatga
ccgagatcggcgagcagccgtgggggcgggagttcgccct
gcgcgacccggccggcaactgcgtgcacttcgtggccgag
gagcaggactgacactcgacctcgaaacttgtttattgca
gcttataatggttacaaataaagcaatagcatcacaaatt
tcacaaataaagcatttttttcactgcattctagttgtgg
tttgtccaaactcatcaatgtatcttatcatgtct

[0138] The phCMV1 backbone sequence (SEQ ID NO: 166):

tagttattaatagtaatcaattacggggtcattagttcat
agcccatatatggagttccgcgttacataacttacggtaa
atggcccgcctggctgaccgcccaacgacccccgcccatt
gacgtcaataatgacgtatgttcccatagtaacgccaata
gggactttccattgacgtcaatgggtggagtatttacggt
aaactgcccacttggcagtacatcaagtgtatcatatgcc
aagtacgccccctattgacgtcaatgacggtaaatggccc
gcctggcattatgcccagtacatgaccttatgggactttc
ctacttggcagtacatctacgtattagtcatcgctattac
catggtgatgcggttttggcagtacatcaatgggcgtgga
tagcggtttgactcacggggatttccaagtctccacccca
ttgacgtcaatgggagtttgttttggcaccaaaatcaacg
ggactttccaaaatgtcgtaacaactccgccccattgacg
caaatgggcggtaggcgtgtacggtgggaggtctatataa
gcagagctcgtttagtgaaccgtcagatcgcctggagacg
ccatccacgctgttttgacctccatagaagacaccgggac
cgatccagcctccgcggccgggaacggtgcattggaacgc
ggattccccgtgccaagagtgacgtaagtaccgcctatag
actctataggcacacccctttggctcttatgcatgaatta
atacgactcactatagggagacagactgttcctttcctgg
gtcttttctgcaggcaccgtcgtcgacttaacagatctcg
agctcaagcttcgaattctgcagtcgacggtaccgcgggc
ccgggatccaccgggtacaagtaaagcggccgcgactcta
gatcataatcagccataccacatttgtagaggttttactt
gctttaaaaaacctcccacacctccccctgaacctgaaac
ataaaatgaatgcaattgttgttgttaacttgtttattgc
agcttataatggttacaaataaagcaatagcatcacaaat
ttcacaaataaagcatttttttcactgcattctagttgtg
gtttgtccaaactcatcaatgtatcttaaggcgtaaattg
taagcgttaatattttgttaaaattcgcgttaaatttttg
ttaaatcagctcattttttaaccaataggccgaaatcggc
aaaatcccttataaatcaaaagaatagaccgagatagggt
tgagtgttgttccagtttggaacaagagtccactattaaa
gaacgtggactccaacgtcaaagggcgaaaaaccgtctat
cagggcgatggcccactacgtgaaccatcaccctaatcaa
gttttttggggtcgaggtgccgtaaagcactaaatcggaa
ccctaaagggagcccccgatttagagcttgacggggaaag
ccggcgaacgtggcgagaaaggaagggaagaaagcgaaag
gagcgggcgctagggcgctggcaagtgtagcggtcacgct
gcgcgtaaccaccacacccgccgcgcttaatgcgccgcta
cagggcgcgtcaggtggcacttttcggggaaatgtgcgcg
gaacccctatttgtttatttttctaaatacattcaaatat
gtatccgctcatgagacaataaccctgataaatgcttcaa
taatattgaaaaaggaagagtcctgaggcggaaagaacca
gctgtggaatgtgtgtcagttagggtgtggaaagtcccca
ggctccccagcaggcagaagtatgcaaagcatgcatctca
attagtcagcaaccaggtgtggaaagtccccaggctcccc
agcaggcagaagtatgcaaagcatgcatctcaattagtca
gcaaccatagtcccgcccctaactccgcccatcccgcccc
taactccgcccagttccgcccattctccgccccatggctg
actaattttttttatttatgcagaggccgaggccgcctcg
gcctctgagctattccagaagtagtgaggaggcttttttg
gaggcctaggcttttgcaaagatcgatcaagagacaggat
gaggatcgtttcgcatgattgaacaagatggattgcacgc
aggttctccggccgcttgggtggagaggctattcggctat
gactgggcacaacagacaatcggctgctctgatgccgccg
tgttccggctgtcagcgcaggggcgcccggttctttttgt
caagaccgacctgtccggtgccctgaatgaactgcaagac
gaggcagcgcggctatcgtggctggccacgacgggcgttc
cttgcgcagctgtgctcgacgttgtcactgaagcgggaag
ggactggctgctattgggcgaagtgccggggcaggatctc
ctgtcatctcaccttgctcctgccgagaaagtatccatca
tggctgatgcaatgcggcggctgcatacgcttgatccggc
tacctgcccattcgaccaccaagcgaaacatcgcatcgag
cgagcacgtactcggatggaagccggtcttgtcgatcagg
atgatctggacgaagagcatcaggggctcgcgccagccga
actgttcgccaggctcaaggcgagcatgcccgacggcgag
gatctcgtcgtgacccatggcgatgcctgcttgccgaata
tcatggtggaaaatggccgcttttctggattcatcgactg
tggccggctgggtgtggcggaccgctatcaggacatagcg
ttggctacccgtgatattgctgaagagcttggcggcgaat
gggctgaccgcttcctcgtgctttacggtatcgccgctcc
cgattcgcagcgcatcgccttctatcgccttcttgacgag
ttcttctgagcgggactctggggttcgaaatgaccgacca
agcgacgcccaacctgccatcacgagatttcgattccacc
gccgccttctatgaaaggttgggcttcggaatcgttttcc
gggacgccggctggatgatcctccagcgcggggatctcat
gctggagttcttcgcccaccctagggggaggctaactgaa
acacggaaggagacaataccggaaggaacccgcgctatga
cggcaataaaaagacagaataaaacgcacggtgttgggtc
gtttgttcataaacgcggggttcggtcccagggctggcac
tctgtcgataccccaccgagaccccattggggccaatacg
cccgcgtttcttccttttccccaccccaccccccaagttc
gggtgaaggcccagggctcgcagccaacgtcggggcggca
ggccctgccatagcctcaggttactcatatatactttaga
ttgatttaaaacttcatttttaatttaaaaggatctaggt
gaagatcctttttgataatctcatgaccaaaatcccttaa
cgtgagttttcgttccactgagcgtcagaccccgtagaaa
agatcaaaggatcttcttgagatcctttttttctgcgcgt
aatctgctgcttgcaaacaaaaaaaccaccgctaccagcg
gtggtttgtttgccggatcaagagctaccaactctttttc
cgaaggtaactggcttcagcagagcgcagataccaaatac
tgtccttctagtgtagccgtagttaggccaccacttcaag
aactctgtagcaccgcctacatacctcgctctgctaatcc
tgttaccagtggctgctgccagtggcgataagtcgtgtct
taccgggttggactcaagacgatagttaccggataaggcg
cagcggtcgggctgaacggggggttcgtgcacacagccca
gcttggagcgaacgacctacaccgaactgagatacctaca
gcgtgagctatgagaaagcgccacgcttcccgaagggaga
aaggcggacaggtatccggtaagcggcagggtcggaacag
gagagcgcacgagggagcttccagggggaaacgcctggta
tctttatagtcctgtcgggtttcgccacctctgacttgag
cgtcgatttttgtgatgctcgtcaggggggcggagcctat
ggaaaaacgccagcaacgcggcctttttacggttcctggc
cttttgctggccttttgctcacatgttctttcctgcgtta
tcccctgattctgtggataaccgtattaccgccatgcat

[0139] The pTCP backbone sequence (SEQ ID NO: 167):

tagttattaatagtaatcaattacggggtcattagttcat
agcccatatatggagttccgcgttacataacttacggtaa
atggcccgcctggctgaccgcccaacgacccccgcccatt
gacgtcaataatgacgtatgttcccatagtaacgccaata
gggactttccattgacgtcaatgggtggagtatttacggt
aaactgcccacttggcagtacatcaagtgtatcatatgcc
aagtacgccccctattgacgtcaatgacggtaaatggccc
gcctggcattatgcccagtacatgaccttatgggactttc
ctacttggcagtacatctacgtattagtcatcgctattac
catggtgatgcggttttggcagtacatcaatgggcgtgga
tagcggtttgactcacggggatttccaagtctccacccca
ttgacgtcaatgggagtttgttttggcaccaaaatcaacg
ggactttccaaaatgtcgtaacaactccgccccattgacg
caaatgggcggtaggcgtgtacggtgggaggtctatataa
gcagagctggtttagtgaaccgtggatcccgtcgcttacc
gattcagaatggttgatatccgccattctgaatcggtaag
cgacgaagcttaataaaggatcttttattttcattggatc
tgtgtgttggttttttgtgtgcggccgccctcgactgtgc
cttctagaagacaatagcaggcatgctggggatgcggtgg
gctctatggcttctgaggcggaaagaaccagctggggctc
tagggggtatccccacgcgccctgtagcggcgcattaagc
gcggcgggtgtggtggttacgcgcagcgtgaccgctacac
ttgccagcgccctagcgcccgctcctttcgctttcttccc
ttcctttctcgccacgttcgccggctttccccgtcaagct
ctaaatcgggggctccctttagggttccgatttagtgctt
tacggcacctcgaccccaaaaaacttgattagggtgatgg
ttcacgtagtgggccatcgccctgatagacggtttttcgc
cctttgacgttggagtccacgttctttaatagtggactct
tgttccaaactggaacaacactcaaccctatctcggtcta
ttcttttgatttataagggattttgccgatttcggcctat
tggttaaaaaatgagctgatttaacaaaaatttaacgcga
attaattctgtggaatgtgtgtcagttagggtgtggaaag
tccccaggctccccagcaggcagaagtatgcaaagcatgc
atctcaattagtcagcaaccaggtgtggaaagtccccagg
ctccccagcaggcagaagtatgcaaagcatgcatctcaat
tagtcagcaaccatagtcccgcccctaactccgcccatcc
cgcccctaactccgcccagttccgcccattctccgcccca
tggctgactaattttttttatttatgcagaggccgaggcc
gcctctgcctctgagctattccagaagtagtgaggaggct
tttttggaggcctaggcttttgcaaaaagctcccgggatg
accgagtacaagcccacggtgcgcctcgccacccgcgacg
acgtcccgcgggccgtacgcaccctcgccgccgcgttcgc
cgactaccccgccacgcgccacaccgtcgacccggaccgc
cacatcgagcgggtcaccgagctgcaagaactcttcctca
cgcgcgtcgggctcgacatcggcaaggtgtgggtcgcgga
cgacggcgccgcggtggcggtctggaccacgccggagagc
gtcgaagcgggggcggtgttcgccgagatcggcccgcgca
tggccgagttgagcggttcccggctggccgcgcagcaaca
gatggaaggcctcctggcgccgcaccggcccaaggagccc
gcgtggttcctggccaccgtcggcgtctcgcccgaccacc
agggcaagggtctgggcagcgccgtcgtgctccccggagt
ggaggcggccgagcgcgccggggtgcccgccttcctggag
acctccgcgccccgcaacctccccttctacgagcggctcg
gcttcaccgtcaccgccgacgtcgaggtgcccgaaggacc
gcgcacctggtgcatgacccgcaagcccggtgcctgattc
gaatgaccgaccaagcgacgcccaacctgccatcacgaga
tttcgattccaccgccgccttctatgaaaggttgggcttc
ggaatcgttttccgggacgccggctggatgatcctccagc
gcggggatctcatgctggagttcttcgcccaccccaactt
gtttattgcagcttataatggttacaaataaagcaatagc
atcacaaatttcacaaataaagcatttttttcactgcatt
ctagttgtggtttgtccaaactcatcaatgtatcttatca
tgtctgtataccgtcgacctctagctagagcttggcgtaa
tcatggtcatagctgtttcctgtgtgaaattgttatccgc
tcacaattccacacaacatacgagccggaagcataaagtg
taaagcctggggtgcctaatgagtgagctaactcacatta
attgcgttgcgctcactgcccgctttccagtcgggaaacc
tgtcgtgccagctgcattaatgaatcggccaacgcgcggg
gagaggcggtttgcgtattgggcgctcttccgcttcctcg
ctcactgactcgctgcgctcggtcgttcggctgcggcgag
cggtatcagctcactcaaaggcggtaatacggttatccac
agaatcaggggataacgcaggaaagaacatgtgagcaaaa
ggccagcaaaaggccaggaaccgtaaaaaggccgcgttgc
tggcgtttttccataggctccgcccccctgacgagcatca
caaaaatcgacgctcaagtcagaggtggcgaaacccgaca
ggactataaagataccaggcgtttccccctggaagctccc
tcgtgcgctctcctgttccgaccctgccgcttaccggata
cctgtccgcctttctcccttcgggaagcgtggcgctttct
catagctcacgctgtaggtatctcagttcggtgtaggtcg
ttcgctccaagctgggctgtgtgcacgaaccccccgttca
gcccgaccgctgcgccttatccggtaactatcgtcttgag
tccaacccggtaagacacgacttatcgccactggcagcag
ccactggtaacaggattagcagagcgaggtatgtaggcgg
tgctacagagttcttgaagtggtggcctaactacggctac
actagaagaacagtatttggtatctgcgctctgctgaagc
cagttaccttcggaaaaagagttggtagctcttgatccgg
caaacaaaccaccgctggtagcggtttttttgtttgcaag
cagcagattacgcgcagaaaaaaaggatctcaagaagatc
ctttgatcttttctacggggtctgacgctcagtggaacga
aaactcacgttaagggattttggtcatgagattatcaaaa
aggatcttcacctagatccttttaaattaaaaatgaagtt
ttaaatcaatctaaagtatatatgagtaaacttggtctga
cagttaccaatgcttaatcagtgaggcacctatctcagcg
atctgtctatttcgttcatccatagttgcctgactccccg
tcgtgtagataactacgatacgggagggcttaccatctgg
ccccagtgctgcaatgataccgcgagacccacgctcaccg
gctccagatttatcagcaataaaccagccagccggaaggg
ccgagcgcagaagtggtcctgcaactttatccgcctccat
ccagtctattaattgttgccgggaagctagagtaagtagt
tcgccagttaatagtttgcgcaacgttgttgccattgcta
caggcatcgtggtgtcacgctcgtcgtttggtatggcttc
attcagctccggttcccaacgatcaaggcgagttacatga
tcccccatgttgtgcaaaaaagcggttagctccttcggtc
ctccgatcgttgtcagaagtaagttggccgcagtgttatc
actcatggttatggcagcactgcataattctcttactgtc
atgccatccgtaagatgcttttctgtgactggtgagtact
caaccaagtcattctgagaatagtgtatgcggcgaccgag
ttgctcttgcccggcgtcaatacgggataataccgcgcca
catagcagaactttaaaagtgctcatcattggaaaacgtt
cttcggggcgaaaactctcaaggatcttaccgctgttgag
atccagttcgatgtaacccactcgtgcacccaactgatct
tcagcatcttttactttcaccagcgtttctgggtgagcaa
aaacaggaaggcaaaatgccgcaaaaaagggaataagggc
gacacggaaatgttgaatactcatactcttcctttttcaa
tattattgaagcatttatcagggttattgtctcatgagcg
gatacatatttgaatgtatttagaaaaataaacaaatagg
ggttccgcgcacatttccccgaaaagtgccacctgacgtc
gacggatcgggagatctcccgatcccctatggtgcactct
cagtacaatctgctctgatgccgcatagttaagccagtat
ctgctccctgcttgtgtgttggaggtcgctgagtagtgcg
cgagcaaaatttaagctacaacaaggcaaggcttgaccga
caattgcatgaagaatctgcttagggttaggcgttttgcg
ctgcttcgcgatgtacgggccagatatacgcgttgacatt
gattattgac

[0140] The pIRES backbone sequence (SEQ ID NO: 168):

tcaatattggccattagccatattattcattggttatata
gcataaatcaatattggctattggccattgcatacgttgt
atctatatcataatatgtacatttatattggctcatgtcc
aatatgaccgccatgttggcattgattattgactagttat
taatagtaatcaattacggggtcattagttcatagcccat
atatggagttccgcgttacataacttacggtaaatggccc
gcctggctgaccgcccaacgacccccgcccattgacgtca
ataatgacgtatgttcccatagtaacgccaatagggactt
tccattgacgtcaatgggtggagtatttacggtaaactgc
ccacttggcagtacatcaagtgtatcatatgccaagtccg
ccccctattgacgtcaatgacggtaaatggcccgcctggc
attatgcccagtacatgaccttacgggactttcctacttg
gcagtacatctacgtattagtcatcgctattaccatggtg
atgcggttttggcagtacaccaatgggcgtggatagcggt
ttgactcacggggatttccaagtctccaccccattgacgt
caatgggagtttgttttggcaccaaaatcaacgggacttt
ccaaaatgtcgtaacaactgcgatcgcccgccccgttgac
gcaaatgggcggtaggcgtgtacggtgggaggtctatata
agcagagctcgtttagtgaaccgtcagatcactagaagct
ttattgcggtagtttatcacagttaaattgctaacgcagt
cagtgcttctgacacaacagtctcgaacttaagctgcagt
gactctcttaaggtagccttgcagaagttggtcgtgaggc
actgggcaggtaagtatcaaggttacaagacaggtttaag
gagaccaatagaaactgggcttgtcgagacagagaagact
cttgcgtttctgataggcacctattggtcttactgacatc
cactttgcctttctctccacaggtgtccactcccagttca
attacagctcttaaggctagagtacttaatacgactcact
ataggctagcctcgagaattcacgcgtcgagcatgcatct
agggcggccaattccgcccctctcccccccccccctctcc
ctcccccccccctaacgttactggccgaagccgcttggaa
taaggccggtgtgcgtttgtctatatgttattttccacca
tattgccgtcttttggcaatgtgagggcccggaaacctgg
ccctgtcttcttgacgagcattcctaggggtctttcccct
ctcgccaaaggaatgcaaggtctgttgaatgtcgtgaagg
aagcagttcctctggaagcttcttgaagacaaacaacgtc
tgtagcgaccctttgcaggcagcggaaccccccacctggc
gacaggtgcctctgcggccaaaagccacgtgtataagata
cacctgcaaaggcggcacaaccccagtgccacgttgtgag
ttggatagttgtggaaagagtcaaatggctctcctcaagc
gtattcaacaaggggctgaaggatgcccagaaggtacccc
attgtatgggatctgatctggggcctcggtgcacatgctt
tacatgtgtttagtcgaggttaaaaaaacgtctaggcccc
ccgaaccacggggacgtggttttcctttgaaaaacacgat
gataagcttgccacaacccgggatcctctagagtcgaccc
gggcggccgcttccctttagtgagggttaatgcttcgagc
agacatgataagatacattgatgagtttggacaaaccaca
actagaatgcagtgaaaaaaatgctttatttgtgaaattt
gtgatgctattgctttatttgtaaccattataagctgcaa
taaacaagttaacaacaacaattgcattcattttatgttt
caggttcagggggagatgtgggaggttttttaaagcaagt
aaaacctctacaaatgtggtaaaatccgataaggatcgat
ccgggctggcgtaatagcgaagaggcccgcaccgatcgcc
cttcccaacagttgcgcagcctgaatggcgaatggacgcg
ccctgtagcggcgcattaagcgcggcgggtgtggtggtta
cgcgcagcgtgaccgctacacttgccagcgccctagcgcc
cgctcctttcgctttcttcccttcctttctcgccacgttc
gccggctttccccgtcaagctctaaatcgggggctccctt
tagggttccgatttagtgctttacggcacctcgaccccaa
aaaacttgattagggtgatggttcacgtagtgggccatcg
ccctgatagacggtttttcgccctttgacgttggagtcca
cgttctttaatagtggactcttgttccaaactggaacaac
actcaaccctatctcggtctattcttttgatttataaggg
attttgccgatttcggcctattggttaaaaaatgagctga
tttaacaaaaatttaacgcgaattttaacaaaatattaac
gcttacaatttcctgatgcggtattttctccttacgcatc
tgtgcggtatttcacaccgcatacgcggatctgcgcagca
ccatggcctgaaataacctctgaaagaggaacttggttag
gtaccttctgaggcggaaagaaccagctgtggaatgtgtg
tcagttagggtgtggaaagtccccaggctccccagcaggc
agaagtatgcaaagcatgcatctcaattagtcagcaacca
ggtgtggaaagtccccaggctccccagcaggcagaagtat
gcaaagcatgcatctcaattagtcagcaaccatagtcccg
cccctaactccgcccatcccgcccctaactccgcccagtt
ccgcccattctccgccccatggctgactaattttttttat
ttatgcagaggccgaggccgcctcggcctctgagctattc
cagaagtagtgaggaggcttttttggaggcctaggctttt
gcaaaaagcttgattcttctgacacaacagtctcgaactt
aaggctagagccaccatgattgaacaagatggattgcacg
caggttctccggccgcttgggtggagaggctattcggcta
tgactgggcacaacagacaatcggctgctctgatgccgcc
gtgttccggctgtcagcgcaggggcgcccggttctttttg
tcaagaccgacctgtccggtgccctgaatgaactgcagga
cgaggcagcgcggctatcgtggctggccacgacgggcgtt
ccttgcgcagctgtgctcgacgttgtcactgaagcgggaa
gggactggctgctattgggcgaagtgccggggcaggatct
cctgtcatctcaccttgctcctgccgagaaagtatccatc
atggctgatgcaatgcggcggctgcatacgcttgatccgg
ctacctgcccattcgaccaccaagcgaaacatcgcatcga
gcgagcacgtactcggatggaagccggtcttgtcgatcag
gatgatctggacgaagagcatcaggggctcgcgccagccg
aactgttcgccaggctcaaggcgcgcatgcccgacggcga
ggatctcgtcgtgacccatggcgatgcctgcttgccgaat
atcatggtggaaaatggccgcttttctggattcatcgact
gtggccggctgggtgtggcggaccgctatcaggacatagc
gttggctacccgtgatattgctgaagagcttggcggcgaa
tgggctgaccgcttcctcgtgctttacggtatcgccgctc
ccgattcgcagcgcatcgccttctatcgccttcttgacga
gttcttctgagcgggactctggggttcgaaatgaccgacc
aagcgacgcccaacctgccatcacgatggccgcaataaaa
tatctttattttcattacatctgtgtgttggttttttgtg
tgaatcgatagcgataaggatccgcgtatggtgcactctc
agtacaatctgctctgatgccgcatagttaagccagcccc
gacacccgccaacacccgctgacgcgccctgacgggcttg
tctgctcccggcatccgcttacagacaagctgtgaccgtc
tccgggagctgcatgtgtcagaggttttcaccgtcatcac
cgaaacgcgcgagacgaaagggcctcgtgatacgcctatt
tttataggttaatgtcatgataataatggtttcttagacg
tcaggtggcacttttcggggaaatgtgcgcggaaccccta
tttgtttatttttctaaatacattcaaatatgtatccgct
catgagacaataaccctgataaatgcttcaataatattga
aaaaggaagagtatgagtattcaacatttccgtgtcgccc
ttattcccttttttgcggcattttgccttcctgtttttgc
tcacccagaaacgctggtgaaagtaaaagatgctgaagat
cagttgggtgcacgagtgggttacatcgaactggatctca
acagcggtaagatccttgagagttttcgccccgaagaacg
ttttccaatgatgagcacttttaaagttctgctatgtggc
gcggtattatcccgtattgacgccgggcaagagcaactcg
gtcgccgcatacactattctcagaatgacttggttgagta
ctcaccagtcacagaaaagcatcttacggatggcatgaca
gtaagagaattatgcagtgctgccataaccatgagtgata
acactgcggccaacttacttctgacaacgatcggaggacc
gaaggagctaaccgcttttttgcacaacatgggggatcat
gtaactcgccttgatcgttgggaaccggagctgaatgaag
ccataccaaacgacgagcgtgacaccacgatgcctgtagc
aatggcaacaacgttgcgcaaactattaactggcgaacta
cttactctagcttcccggcaacaattaatagactggatgg
aggcggataaagttgcaggaccacttctgcgctcggccct
tccggctggctggtttattgctgataaatctggagccggt
gagcgtgggtctcgcggtatcattgcagcactggggccag
atggtaagccctcccgtatcgtagttatctacacgacggg
gagtcaggcaactatggatgaacgaaatagacagatcgct
gagataggtgcctcactgattaagcattggtaactgtcag
accaagtttactcatatatactttagattgatttaaaact
tcatttttaatttaaaaggatctaggtgaagatccttttt
gataatctcatgaccaaaatcccttaacgtgagttttcgt
tccactgagcgtcagaccccgtagaaaagatcaaaggatc
ttcttgagatcctttttttctgcgcgtaatctgctgcttg
caaacaaaaaaaccaccgctaccagcggtggtttgtttgc
cggatcaagagctaccaactctttttccgaaggtaactgg
cttcagcagagcgcagataccaaatactgttcttctagtg
tagccgtagttaggccaccacttcaagaactctgtagcac
cgcctacatacctcgctctgctaatcctgttaccagtggc
tgctgccagtggcgataagtcgtgtcttaccgggttggac
tcaagacgatagttaccggataaggcgcagcggtcgggct
gaacggggggttcgtgcacacagcccagcttggagcgaac
gacctacaccgaactgagatacctacagcgtgagctatga
gaaagcgccacgcttcccgaagggagaaaggcggacaggt
atccggtaagcggcagggtcggaacaggagagcgcacgag
ggagcttccagggggaaacgcctggtatctttatagtcct
gtcgggtttcgccacctctgacttgagcgtcgatttttgt
gatgctcgtcaggggggcggagcctatggaaaaacgccag
caacgcggcctttttacggttcctggccttttgctggcct
tttgctcacatggctcgacagatct

[0141] In some embodiments therefore, the composition of the disclosure comprises a nucleic acid molecule comprising at least about 70%, 75%, 80%, 85%, 86%, 87%, 88%, 89%, 90%, 91%, 92%, 93%, 94%, 95%, 96%, 97%, 98% or 99% sequence identity to SEQ ID NO: 161, SEQ ID NO: 162, SEQ ID NO: 163, SEQ ID NO: 164, SEQ ID NO: 165, SEQ ID NO: 166, SEQ ID NO: 1676 or SEQ ID NO: 168, or a functional fragment or variant thereof. In some embodiments, the composition of the disclosure comprises a nucleic acid molecule comprising the nucleotide sequence of SEQ ID NO: 161, SEQ ID NO: 162, SEQ ID NO: 163, SEQ ID NO: 164, SEQ ID NO: 165, SEQ ID NO: 166, SEQ ID NO: 1676 or SEQ ID NO: 168, or a functional fragment or variant thereof. In some embodiments, the composition of the disclosure comprises a nucleic acid molecule that is a pVax variant.

[0142] In some embodiments, the composition of the disclosure comprises a nucleic acid molecule or a plasmid comprising at least about 70%, 75%, 80%, 85%, 86%, 87%, 88%, 89%, 90%, 91%, 92%, 93%, 94%, 95%, 96%, 97%, 98%. 99% or 100% sequence identity to SEQ ID NO: 161, SEQ ID NO: 162, SEQ ID NO: 163, SEQ ID NO: 164, SEQ ID NO: 165, SEQ ID NO: 166, SEQ ID NO: 1676 or SEQ ID NO: 168, or a functional fragment or variant thereof, and an expressible nucleic acid sequence comprising a first nucleic acid sequence encoding a scaffold domain comprising any of the self-assembling polypeptides disclosed herein, or a functional fragment or variant thereof, and a second nucleic acid sequence encoding an antigen domain comprising any of the viral antigens disclosed herein, or a functional fragment or variant thereof. In some embodiments, the composition of the disclosure comprises a nucleic acid molecule or a plasmid comprising at least about 70%, 75%, 80%, 85%, 86%, 87%, 88%, 89%, 90%, 91%, 92%, 93%, 94%, 95%, 96%, 97%, 98%, 99% or 100% sequence identity to SEQ ID NO: 161, SEQ ID NO: 162, SEQ ID NO: 163, SEQ ID NO: 164, SEQ ID NO: 165, SEQ ID NO: 166, SEQ ID NO: 1676 or SEQ ID NO: 168, or a functional fragment or variant thereof, and an expressible nucleic acid sequence comprising a first nucleic acid sequence encoding a scaffold domain comprising a self-assembling polypeptide comprising at least about 70%, 75%, 80%, 85%, 86%, 87%, 88%, 89%, 90%, 91%, 92%, 93%, 94%, 95%, 96%, 97%, 98%, 99% or 100% sequence identity to SEQ ID NO: 8, SEQ ID NO: 10, SEQ ID NO: 12, SEQ ID NO: 14, SEQ ID NO: 16, SEQ ID NO: 18 or SEQ ID NO: 20, or a functional fragment or variant thereof, and a second nucleic acid sequence encoding an antigen domain comprising a viral antigen comprising at least about 70%, 75%, 80%, 85%, 86%, 87%, 88%, 89%, 90%, 91%, 92%, 93%, 94%, 95%, 96%, 97%, 98%, 99% or 100% sequence identity to SEQ ID NO: 60, SEQ ID NO: 62, SEQ ID NO: 64, SEQ ID NO: 66, SEQ ID NO: 171, SEQ ID NO: 172, SEQ ID NO: 173, SEQ ID NO: 174, SEQ ID NO: 175, SEQ ID NO: 176 or SEQ ID NO: 177, or a functional fragment or variant thereof. In some embodiments, the composition of the disclosure comprises a nucleic acid molecule or a plasmid comprising at least about 70%, 75%, 80%, 85%, 86%, 87%, 88%, 89%, 90%, 91%, 92%, 93%, 94%, 95%, 96%, 97%, 98%, 99% or 100% sequence identity to SEQ ID NO: 161, SEQ ID NO: 162, SEQ ID NO: 163, SEQ ID NO: 164, SEQ ID NO: 165, SEQ ID NO: 166, SEQ ID NO: 1676 or SEQ ID NO: 168, or a functional fragment or variant thereof, and an expressible nucleic acid sequence comprising a first nucleic acid sequence comprising at least about 70%, 75%, 80%, 85%, 86%, 87%, 88%, 89%, 90%, 91%, 92%, 93%, 94%, 95%, 96%, 97%, 98%, 99% or 100% sequence identity to SEQ ID NO: 7, SEQ ID NO: 9, SEQ ID NO: 11, SEQ ID NO: 13, SEQ ID NO: 15, SEQ ID NO: 17 or SEQ ID NO: 19, or a functional fragment or variant thereof, and a second nucleic acid sequence comprising at least about 70%, 75%, 80%, 85%, 86%, 87%, 88%, 89%, 90%, 91%, 92%, 93%, 94%, 95%, 96%, 97%, 98%, 99% or 100% sequence identity to SEQ ID NO: 59, SEQ ID NO: 61, SEQ ID NO: 63 or SEQ ID NO: 65, or a functional fragment or variant thereof. In some embodiments, such nucleic acid molecules or plasmids may further comprise a third nucleic acid sequence encoding a leader sequence comprising at least about 70%, 75%, 80%, 85%, 86%, 87%, 88%, 89%, 90%, 91%, 92%, 93%, 94%, 95%, 96%, 97%, 98%, 99% or 100% sequence identity to SEQ ID NO: 1 or SEQ ID NO: 5, or a functional fragment or variant thereof. In such embodiments, the third nucleic acid sequence encoding a leader sequence may comprising at least about 70%, 75%, 80%, 85%, 86%, 87%, 88%, 89%, 90%, 91%, 92%, 93%, 94%, 95%, 96%, 97%, 98%, 99% or 100% sequence identity to SEQ ID NO: 2, SEQ ID NO: 3, SEQ ID NO: 4 or SEQ ID NO: 6, or a functional fragment or variant thereof.

[0143] In some embodiments, the nucleic acid molecules or plasmids of the disclosure may additionally comprise another nucleic acid sequence encoding a linker comprising at least about 70%, 75%, 80%, 85%, 86%, 87%, 88%, 89%, 90%, 91%, 92%, 93%, 94%, 95%, 96%, 97%, 98%, 99% or 100% sequence identity to SEQ ID NO: 22, SEQ ID NO: 23, SEQ ID NO: 24, SEQ ID NO: 25, SEQ ID NO: 26, SEQ ID NO: 32, SEQ ID NO: 34, SEQ ID NO: 36, SEQ ID NO: 38, SEQ ID NO: 40, SEQ ID NO: 42, SEQ ID NO: 44, SEQ ID NO: 46, SEQ ID NO: 48, SEQ ID NO: 50, SEQ ID NO: 52, SEQ ID NO: 54, SEQ ID NO: 56 or SEQ ID NO: 58, or a functional fragment or variant thereof. In some embodiments, the nucleic acid sequence encoding a linker may comprising at least about 70%, 75%, 80%, 85%, 86%, 87%, 88%, 89%, 90%, 91%, 92%, 93%, 94%, 95%, 96%, 97%, 98%, 99% or 100% sequence identity to SEQ ID NO: 21, SEQ ID NO: 27, SEQ ID NO: 28, SEQ ID NO: 29, SEQ ID NO: 30, SEQ ID NO: 31, SEQ ID NO: 33, SEQ ID NO: 35, SEQ ID NO: 37, SEQ ID NO: 39, SEQ ID NO: 41, SEQ ID NO: 43, SEQ ID NO: 45, SEQ ID NO: 47, SEQ ID NO: 49, SEQ ID NO: 51, SEQ ID NO: 53, SEQ ID NO: 55 or SEQ ID NO: 57 or a functional fragment or variant thereof.

[0144] In some embodiments, the composition of the disclosure comprises a nucleic acid molecule or a plasmid comprising at least about 70%, 75%, 80%, 85%, 86%, 87%, 88%, 89%, 90%, 91%, 92%, 93%, 94%, 95%, 96%, 97%, 98%, 99% or 100% sequence identity to SEQ ID NO: 161, SEQ ID NO: 162, SEQ ID NO: 163, SEQ ID NO: 164, SEQ ID NO: 165, SEQ ID NO: 166, SEQ ID NO: 1676 or SEQ ID NO: 168, or a functional fragment or variant thereof, and an expressible nucleic acid sequence comprising a first nucleic acid sequence encoding a leader sequence comprising any of the leader sequences disclosed herein, or a functional fragment or variant thereof, and a second nucleic acid sequence encoding a viral trimer (or three viral monomers) comprising any of the viral antigens disclosed herein, or a functional fragment or variant thereof. In some embodiments, the composition of the disclosure comprises a nucleic acid molecule or a plasmid comprising at least about 70%, 75%, 80%, 85%, 86%, 87%, 88%, 89%, 90%, 91%, 92%, 93%, 94%, 95%, 96%, 97%, 98%, 99% or 100% sequence identity to SEQ ID NO: 161, SEQ ID NO: 162, SEQ ID NO: 163, SEQ ID NO: 164, SEQ ID NO: 165, SEQ ID NO: 166, SEQ ID NO: 1676 or SEQ ID NO: 168, or a functional fragment or variant thereof, and an expressible nucleic acid sequence comprising a first nucleic acid sequence encoding a leader sequence comprising at least about 70%, 75%, 80%, 85%, 86%, 87%, 88%, 89%, 90%, 91%, 92%, 93%, 94%, 95%, 96%, 97%, 98%, 99% or 100% sequence identity to SEQ ID NO: 1 or SEQ ID NO: 5, or a functional fragment or variant thereof, and a second nucleic acid sequence encoding three viral monomers, each viral monomer independently comprising at least about 70%, 75%, 80%, 85%, 86%, 87%, 88%, 89%, 90%, 91%, 92%, 93%, 94%, 95%, 96%, 97%, 98%, 99% or 100% sequence identity to SEQ ID NO: 60, SEQ ID NO: 62, SEQ ID NO: 64, SEQ ID NO: 66, SEQ ID NO: 171, SEQ ID NO: 172, SEQ ID NO: 173, SEQ ID NO: 174, SEQ ID NO: 175, SEQ ID NO: 176 or SEQ ID NO: 177, or a functional fragment or variant thereof. In some embodiments, the composition of the disclosure comprises a nucleic acid molecule or a plasmid comprising at least about 70%, 75%, 80%, 85%, 86%, 87%, 88%, 89%, 90%, 91%, 92%, 93%, 94%, 95%, 96%, 97%, 98%, 99% or 100% sequence identity to SEQ ID NO: 161, SEQ ID NO: 162, SEQ ID NO: 163, SEQ ID NO: 164, SEQ ID NO: 165, SEQ ID NO: 166, SEQ ID NO: 1676 or SEQ ID NO: 168, or a functional fragment or variant thereof, and an expressible nucleic acid sequence comprising a first nucleic acid sequence comprising at least about 70%, 75%, 80%, 85%, 86%, 87%, 88%, 89%, 90%, 91%, 92%, 93%, 94%, 95%, 96%, 97%, 98%, 99% or 100% sequence identity to SEQ ID NO: 2, SEQ ID NO: 3, SEQ ID NO: 4 or SEQ ID NO: 6, or a functional fragment or variant thereof, and a second nucleic acid sequence encoding three viral monomers, each viral monomer independently being encoded by a nucleic acid sequence comprising at least about 70%, 75%, 80%, 85%, 86%, 87%, 88%, 89%, 90%, 91%, 92%, 93%, 94%, 95%, 96%, 97%, 98%, 99% or 100% sequence identity to SEQ ID NO: 59, SEQ ID NO: 61, SEQ ID NO: 63 or SEQ ID NO: 65, or a functional fragment or variant thereof. In some embodiments, each of the viral monomers is linked by one or more linker peptides comprising at least about 70%, 75%, 80%, 85%, 86%, 87%, 88%, 89%, 90%, 91%, 92%, 93%, 94%, 95%, 96%, 97%, 98%, 99% or 100% sequence identity to SEQ ID NO: 22, SEQ ID NO: 23, SEQ ID NO: 24, SEQ ID NO: 25, SEQ ID NO: 26, SEQ ID NO: 32, SEQ ID NO: 34, SEQ ID NO: 36, SEQ ID NO: 38, SEQ ID NO: 40, SEQ ID NO: 42, SEQ ID NO: 44, SEQ ID NO: 46, SEQ ID NO: 48, SEQ ID NO: 50, SEQ ID NO: 52, SEQ ID NO: 54, SEQ ID NO: 56 or SEQ ID NO: 58, or a functional fragment or variant thereof. In some embodiments, each of the viral monomers is linked by one or more linker peptides encoded by a nucleic acid sequence comprising at least about 70%, 75%, 80%, 85%, 86%, 87%, 88%, 89%, 90%, 91%, 92%, 93%, 94%, 95%, 96%, 97%, 98%, 99% or 100% sequence identity to SEQ ID NO: 21, SEQ ID NO: 27, SEQ ID NO: 28, SEQ ID NO: 29, SEQ ID NO: 30, SEQ ID NO: 31, SEQ ID NO: 33, SEQ ID NO: 35, SEQ ID NO: 37, SEQ ID NO: 39, SEQ ID NO: 41, SEQ ID NO: 43, SEQ ID NO: 45, SEQ ID NO: 47, SEQ ID NO: 49, SEQ ID NO: 51, SEQ ID NO: 53, SEQ ID NO: 55 or SEQ ID NO: 57 or a functional fragment or variant thereof.

[0145] In some embodiments, any of the nucleic acid molecules or plasmids of the disclosure additionally comprises a nucleic acid sequence encoding a furin cleavage site comprising at least about 60%, 65%, 70%, 75%, 80%, 85%, 86%, 87%, 88%, 89%, 90%, 91%, 92%, 93%, 94%, 95%, 96%, 97%, 98%, 99% or 100% sequence identity to SEQ ID NO: 67, or a functional fragment or variant thereof.

[0146] In some embodiments, the nucleic acid molecule or plasmid may further comprises a nucleic acid encoding a transmembrane domain and a foldon domain. A non-limiting example of the transmembrane domain is the transmembrane domain of a platelet derived growth factor receptor comprising the sequence of AVGQDTQEVIVVPHSL PFKVVVISAILALVVLTIISLIILIMLWQKKPR (SEQ ID NO: 169). A non-limiting example of the foldon domain may comprise the sequence of YIPEAPRDGQAYVRKD GEWVLLSTFL (SEQ ID NO: 170). Thus, in some embodiments, the composition of the disclosure comprises a nucleic acid molecule or a plasmid comprising a nucleic acid sequence encoding a transmembrane domain comprising at least about 70%, 75%, 80%, 85%, 86%, 87%, 88%, 89%, 90%, 91%, 92%, 93%, 94%, 95%, 96%, 97%, 98%, 99% or 100% sequence identity to SEQ ID NO: 169, or a functional fragment or variant thereof. In some embodiments, the composition of the disclosure comprises a nucleic acid molecule or a plasmid comprising a nucleic acid sequence encoding a foldon domain comprising at least about 70%, 75%, 80%, 85%, 86%, 87%, 88%, 89%, 90%, 91%, 92%, 93%, 94%, 95%, 96%, 97%, 98%, 99% or 100% sequence identity to SEQ ID NO: 170, or a functional fragment or variant thereof.

[0147] In some embodiments, the composition of the disclosure comprises a nucleic acid molecule or a plasmid comprising at least about 70%, 75%, 80%, 85%, 86%, 87%, 88%, 89%, 90%, 91%, 92%, 93%, 94%, 95%, 96%, 97%, 98%, 99% or 100% sequence identity to SEQ ID NO: 161, SEQ ID NO: 162, SEQ ID NO: 163, SEQ ID NO: 164, SEQ ID NO: 165, SEQ ID NO: 166, SEQ ID NO: 1676 or SEQ ID NO: 168, or a functional fragment or variant thereof, and an expressible nucleic acid sequence comprising at least about 70%, 75%, 80%, 85%, 86%, 87%, 88%, 89%, 90%, 91%, 92%, 93%, 94%, 95%, 96%, 97%, 98%, 99% or 100% sequence identity to SEQ ID NO: 68, SEQ ID NO: 69, SEQ ID NO: 71, SEQ ID NO: 72, SEQ ID NO: 74, SEQ ID NO: 75, SEQ ID NO: 77, SEQ ID NO: 78, SEQ ID NO: 80, SEQ ID NO: 81, SEQ ID NO: 83, SEQ ID NO: 84, SEQ ID NO: 86, SEQ ID NO: 87, SEQ ID NO: 89, SEQ ID NO: 90, SEQ ID NO: 92, SEQ ID NO: 93, SEQ ID NO: 95, SEQ ID NO: 96, SEQ ID NO: 98, SEQ ID NO: 99, SEQ ID NO: 101, SEQ ID NO: 102, SEQ ID NO: 104, SEQ ID NO: 105, SEQ ID NO: 107, SEQ ID NO: 108, SEQ ID NO: 110, SEQ ID NO: 111, SEQ ID NO: 113, SEQ ID NO: 114, SEQ ID NO: 116, SEQ ID NO: 117, SEQ ID NO: 119, SEQ ID NO: 120, SEQ ID NO: 122, SEQ ID NO: 123, SEQ ID NO: 125, SEQ ID NO: 126, SEQ ID NO: 128, SEQ ID NO: 129, SEQ ID NO: 131, SEQ ID NO: 132, SEQ ID NO: 134, SEQ ID NO: 135, SEQ ID NO: 137, SEQ ID NO: 138, SEQ ID NO: 140, SEQ ID NO: 141, SEQ ID NO: 143, SEQ ID NO: 144, SEQ ID NO: 146, SEQ ID NO: 147, SEQ ID NO: 149, SEQ ID NO: 150, SEQ ID NO: 152, SEQ ID NO: 153, SEQ ID NO: 155, SEQ ID NO: 156, SEQ ID NO: 158 or SEQ ID NO: 159, or a functional fragment or variant thereof. In some embodiments, the composition of the disclosure comprises a nucleic acid molecule or a plasmid comprising the nucleotide sequence of SEQ ID NO: 161, SEQ ID NO: 162, SEQ ID NO: 163, SEQ ID NO: 164, SEQ ID NO: 165, SEQ ID NO: 166, SEQ ID NO: 1676 or SEQ ID NO: 168, or a functional fragment or variant thereof, and an expressible nucleic acid sequence comprising the nucleotide sequence of SEQ ID NO: 68, SEQ ID NO: 69, SEQ ID NO: 71, SEQ ID NO: 72, SEQ ID NO: 74, SEQ ID NO: 75, SEQ ID NO: 77, SEQ ID NO: 78, SEQ ID NO: 80, SEQ ID NO: 81, SEQ ID NO: 83, SEQ ID NO: 84, SEQ ID NO: 86, SEQ ID NO: 87, SEQ ID NO: 89, SEQ ID NO: 90, SEQ ID NO: 92, SEQ ID NO: 93, SEQ ID NO: 95, SEQ ID NO: 96, SEQ ID NO: 98, SEQ ID NO: 99, SEQ ID NO: 101, SEQ ID NO: 102, SEQ ID NO: 104, SEQ ID NO: 105, SEQ ID NO: 107, SEQ ID NO: 108, SEQ ID NO: 110, SEQ ID NO: 111, SEQ ID NO: 113, SEQ ID NO: 114, SEQ ID NO: 116, SEQ ID NO: 117, SEQ ID NO: 119, SEQ ID NO: 120, SEQ ID NO: 122, SEQ ID NO: 123, SEQ ID NO: 125, SEQ ID NO: 126, SEQ ID NO: 128, SEQ ID NO: 129, SEQ ID NO: 131, SEQ ID NO: 132, SEQ ID NO: 134, SEQ ID NO: 135, SEQ ID NO: 137, SEQ ID NO: 138, SEQ ID NO: 140, SEQ ID NO: 141, SEQ ID NO: 143, SEQ ID NO: 144, SEQ ID NO: 146, SEQ ID NO: 147, SEQ ID NO: 149, SEQ ID NO: 150, SEQ ID NO: 152, SEQ ID NO: 153, SEQ ID NO: 155, SEQ ID NO: 156, SEQ ID NO: 158 or SEQ ID NO: 159, or a functional fragment or variant thereof. In some embodiments, the composition of the disclosure comprises a nucleic acid molecule or a plasmid comprising at least about 70%, 75%, 80%, 85%, 86%, 87%, 88%, 89%, 90%, 91%, 92%, 93%, 94%, 95%, 96%, 97%, 98%, 99% or 100% sequence identity to SEQ ID NO: 161, SEQ ID NO: 162, SEQ ID NO: 163, SEQ ID NO: 164, SEQ ID NO: 165, SEQ ID NO: 166, SEQ ID NO: 1676 or SEQ ID NO: 168, or a functional fragment or variant thereof, and an expressible nucleic acid sequence encoding a polypeptide comprising at least about 70%, 75%, 80%, 85%, 86%, 87%, 88%, 89%, 90%, 91%, 92%, 93%, 94%, 95%, 96%, 97%, 98%, 99% or 100% sequence identity to SEQ ID NO: 70, SEQ ID NO: 73, SEQ ID NO: 76, SEQ ID NO: 79, SEQ ID NO: 82, SEQ ID NO: 85, SEQ ID NO: 88, SEQ ID NO: 91, SEQ ID NO: 94, SEQ ID NO: 97, SEQ ID NO: 100, SEQ ID NO: 103, SEQ ID NO: 106, SEQ ID NO: 109, SEQ ID NO: 112, SEQ ID NO: 115, SEQ ID NO: 118, SEQ ID NO: 121, SEQ ID NO: 124, SEQ ID NO: 127, SEQ ID NO: 130, SEQ ID NO: 133, SEQ ID NO: 136, SEQ ID NO: 139, SEQ ID NO: 142, SEQ ID NO: 145, SEQ ID NO: 148, SEQ ID NO: 151, SEQ ID NO: 154, SEQ ID NO: 157 or SEQ ID NO: 160, or a functional fragment or variant thereof. In some embodiments, the composition of the disclosure comprises a nucleic acid molecule or a plasmid comprising the nucleotide sequence of SEQ ID NO: 161, SEQ ID NO: 162, SEQ ID NO: 163, SEQ ID NO: 164, SEQ ID NO: 165, SEQ ID NO: 166, SEQ ID NO: 1676 or SEQ ID NO: 168, or a functional fragment or variant thereof, and an expressible nucleic acid sequence encoding a polypeptide comprising the amino acid sequence of SEQ ID NO: 70, SEQ ID NO: 73, SEQ ID NO: 76, SEQ ID NO: 79, SEQ ID NO: 82, SEQ ID NO: 85, SEQ ID NO: 88, SEQ ID NO: 91, SEQ ID NO: 94, SEQ ID NO: 97, SEQ ID NO: 100, SEQ ID NO: 103, SEQ ID NO: 106, SEQ ID NO: 109, SEQ ID NO: 112, SEQ ID NO: 115, SEQ ID NO: 118, SEQ ID NO: 121, SEQ ID NO: 124, SEQ ID NO: 127, SEQ ID NO: 130, SEQ ID NO: 133, SEQ ID NO: 136, SEQ ID NO: 139, SEQ ID NO: 142, SEQ ID NO: 145, SEQ ID NO: 148, SEQ ID NO: 151, SEQ ID NO: 154, SEQ ID NO: 157 or SEQ ID NO: 160, or a functional fragment or variant thereof.

[0148] In some embodiments, the disclosure relates to a vector or a plasmid comprising one or a plurality of regulatory sequences operably linked to one or more of any of the disclosed expressible nucleic acid sequences. In some embodiments, the disclosure relates to a composition comprising a nucleic acid molecule comprising at least about 70%, 75%, 80%, 85%, 86%, 87%, 88%, 89%, 90%, 91%, 92%, 93%, 94%, 95%, 96%, 97%, 98%, 99% or 100% sequence identity to SEQ ID NO: 161, or a functional fragment or variant thereof, and positioned within the multiple cloning site thereof is one or more expressible nucleic acid sequences according to the present disclosure. In some embodiments, the disclosure relates to a composition comprising one or a plurality of RNA molecules, each individually comprising the RNA sequences disclosed herein, including but not limited to SEQ ID NO: 69, SEQ ID NO: 72, SEQ ID NO: 75, SEQ ID NO: 78, SEQ ID NO: 81, SEQ ID NO: 84, SEQ ID NO: 87, SEQ ID NO: 90, SEQ ID NO: 93, SEQ ID NO: 96, SEQ ID NO: 99, SEQ ID NO: 102, SEQ ID NO: 105, SEQ ID NO: 108, SEQ ID NO: 111, SEQ ID NO: 114, SEQ ID NO: 117, SEQ ID NO: 120, SEQ ID NO: 123, SEQ ID NO: 126, SEQ ID NO: 129, SEQ ID NO: 132, SEQ ID NO: 135, SEQ ID NO: 138, SEQ ID NO: 141, SEQ ID NO: 144, SEQ ID NO: 147, SEQ ID NO: 150, SEQ ID NO: 153, SEQ ID NO: 156 or SEQ ID NO: 159, or a functional fragment or variant thereof.

### C. Polypeptide Sequences

[0149] Disclosed are the polypeptide sequences encoded by the disclosed nucleic acid sequences. In some embodiments, the disclosure relates to compositions comprising polypeptide sequences encoded by the expressible nucleic acid molecules of the present disclosure comprising a scaffold domain comprising a self-assembling polypeptide and an antigen domain comprising a viral antigen, and optionally comprising a leader domain comprising a leader sequence and/or a linker domain comprising a linker peptide. In some embodiments, the disclosure relates to compositions comprising polypeptide sequences encoded by the expressible nucleic acid molecules of the present disclosure comprising a leader domain comprising a leader sequence and an antigen domain comprising three viral monomers (trimer), and optionally comprising one or plurality of linker domains each comprising a linker peptide. The disclosure also relates to cells expressing one or more such polypeptides disclosed herein.

[0150] In some embodiments, the antigen domain comprised in the polypeptides of the disclosure comprises a soluble viral trimer or a soluble monomer thereof, wherein the soluble viral trimer or the soluble monomer thereof is from a virus of the family Coronaviridae. A “viral trimer” refers to a protein complex formed by three covalently or non-convalently bound viral proteins. Each of these viral proteins, when present by itself, is called as a “monomer” of the viral trimer.

[0151] Solubility of the disclosed viral trimer or monomer thereof can be determined using any methods known in the art. Protein solubility is a thermodynamic parameter defined as the concentration of protein in a saturated solution that is in equilibrium with a solid phase, either crystalline or amorphous, under a given set of conditions. Solubility can be influenced by a number of extrinsic and intrinsic factors. Extrinsic factors that influence protein solubility include pH, ionic strength, temperature, and the presence of various solvent additives. Varying these extrinsic factors can lead to increased solubility; however, altering the solution conditions is not always appropriate or sufficient to increase protein solubility to the extent required. The intrinsic factors that influence protein solubility are defined primarily by the amino acids on the protein surface, but a detailed understanding of how one can alter the intrinsic properties of a protein to increase its solubility is lacking.

[0152] There are generally two methods used to measure protein solubility in aqueous solution: (1) adding lyophilized protein to solvent; and (2) concentrating a protein solution by ultrafiltration. Both of these methods require that the concentration of protein in solution be increased until saturation is reached; however, this is often difficult to do, especially with very soluble proteins, because gel-like or supersaturated solutions may form, making it difficult to determine the solubility values accurately. When lyophilized protein is added to solvent, the variable water and salt content of the lyophilized powder is difficult to control and can have a significant effect on solubility measurements.

[0153] One way to avoid the difficulties of measuring protein solubility is to make use of an extraneous agent that lowers the solubility of a protein called a precipitant. Protein precipitants can be divided into three classes: salts, organic solvents, and long-chain polymers. These precipitants are used by crystallographers to achieve slow precipitation and crystal formation; however, they can also be used to induce amorphous precipitation by direct mixing with protein solutions. Common examples from each of these three classes of precipitants, respectively, are ammonium sulfate, isopropanol, and polyethylene glycol (PEG). The relationship between precipitant concentration to protein solubility is described by the following general expression:

Log S=constant−β[Precipitant], Equation (1)

where S is the measured solubility at a given concentration of precipitant, and 13 is the dependence of solubility on precipitant concentration for a given protein. The constant is the y-intercept of the solubility plot, and for PEG precipitations is equal to the logarithm of the protein activity. For dilute protein solutions, as the activity constant approaches one, Equation (1) becomes

Log S=Log Sₒ−β[Precipitant], Equation (2)

where S₀ is the solubility in the absence of precipitant. It is showed that for PEG precipitations, the linearity of Equation (1) extends to zero precipitant for proteins whose solubility can be accurately measured in buffer alone. In this case, the constant portion of Equation (2), Log S₀, can be used as an estimate of solubility in the absence of precipitant. For salts, Equation (1) only describes the salting-out region of the solubility plot. At low salt concentrations, salting-in is observed and the solubility is higher than in the absence of salt. Therefore, the constant obtained from salt precipitations represents a projection of the salting-out region onto the y axis. In some embodiments, the nucleic acid sequences of certain compositions encode viral monomers that, upon expression, preferentially form into viral trimers. In some embodiments, the viral antigens form into viral trimer proteins displayed upon a scaffold polypeptide, such as a self-assembling polypeptide polyhedron. In some embodiments, the viral anigens are at a concentration within the disclosed compositions that does not exceed a concentration that causes precipitation out of solution. In some embodiments, the scaffold peptide and the displayed viral antigens are soluble in aqueous solution, such as PBS, sterile water or buffered Ringer's solution.

[0154] In some embodiments, the polypeptide encoded by the expressible nucleic acid molecule of the present disclosure comprises at least about 70%, 75%, 80%, 85%, 86%, 87%, 88%, 89%, 90%, 91%, 92%, 93%, 94%, 95%, 96%, 97%, 98%, 99% or 100% sequence identity to SEQ ID NO: 70, SEQ ID NO: 73, SEQ ID NO: 76, SEQ ID NO: 79, SEQ ID NO: 82, SEQ ID NO: 85, SEQ ID NO: 88, SEQ ID NO: 91, SEQ ID NO: 94, SEQ ID NO: 97, SEQ ID NO: 100, SEQ ID NO: 103, SEQ ID NO: 106, SEQ ID NO: 109, SEQ ID NO: 112, SEQ ID NO: 115, SEQ ID NO: 118, SEQ ID NO: 121, SEQ ID NO: 124, SEQ ID NO: 127, SEQ ID NO: 130, SEQ ID NO: 133, SEQ ID NO: 136, SEQ ID NO: 139, SEQ ID NO: 142, SEQ ID NO: 145, SEQ ID NO: 148, SEQ ID NO: 151, SEQ ID NO: 154, SEQ ID NO: 157 or SEQ ID NO: 160, or a functional fragment or variant thereof. In some embodiments, the polypeptide is encoded by a nucleic acid sequence comprises at least about 70%, 75%, 80%, 85%, 86%, 87%, 88%, 89%, 90%, 91%, 92%, 93%, 94%, 95%, 96%, 97%, 98%, 99% or 100% sequence identity to SEQ ID NO: 68, SEQ ID NO: 69, SEQ ID NO: 71, SEQ ID NO: 72, SEQ ID NO: 74, SEQ ID NO: 75, SEQ ID NO: 77, SEQ ID NO: 78, SEQ ID NO: 80, SEQ ID NO: 81, SEQ ID NO: 83, SEQ ID NO: 84, SEQ ID NO: 86, SEQ ID NO: 87, SEQ ID NO: 89, SEQ ID NO: 90, SEQ ID NO: 92, SEQ ID NO: 93, SEQ ID NO: 95, SEQ ID NO: 96, SEQ ID NO: 98, SEQ ID NO: 99, SEQ ID NO: 101, SEQ ID NO: 102, SEQ ID NO: 104, SEQ ID NO: 105, SEQ ID NO: 107, SEQ ID NO: 108, SEQ ID NO: 110, SEQ ID NO: 111, SEQ ID NO: 113, SEQ ID NO: 114, SEQ ID NO: 116, SEQ ID NO: 117, SEQ ID NO: 119, SEQ ID NO: 120, SEQ ID NO: 122, SEQ ID NO: 123, SEQ ID NO: 125, SEQ ID NO: 126, SEQ ID NO: 128, SEQ ID NO: 129, SEQ ID NO: 131, SEQ ID NO: 132, SEQ ID NO: 134, SEQ ID NO: 135, SEQ ID NO: 137, SEQ ID NO: 138, SEQ ID NO: 140, SEQ ID NO: 141, SEQ ID NO: 143, SEQ ID NO: 144, SEQ ID NO: 146, SEQ ID NO: 147, SEQ ID NO: 149, SEQ ID NO: 150, SEQ ID NO: 152, SEQ ID NO: 153, SEQ ID NO: 155, SEQ ID NO: 156, SEQ ID NO: 158 or SEQ ID NO: 159, or a functional fragment or variant thereof.

[0155] In some embodiments, the leader sequence encoded by the expressible nucleic acid sequence of the disclosure comprises at least about 70%, 75%, 80%, 85%, 86%, 87%, 88%, 89%, 90%, 91%, 92%, 93%, 94%, 95%, 96%, 97%, 98%, 99% or 100% sequence identity to SEQ ID NO: 1 or SEQ ID NO: 5, or a functional fragment or variant thereof. In some embodiments, the leader sequence is encoded by a nucleic acid sequence comprises at least about 70%, 75%, 80%, 85%, 86%, 87%, 88%, 89%, 90%, 91%, 92%, 93%, 94%, 95%, 96%, 97%, 98%, 99% or 100% sequence identity to SEQ ID NO: 2, SEQ ID NO: 3, SEQ ID NO: 4 or SEQ ID NO: 6, or a functional fragment or variant thereof.

[0156] In some embodiments, the self-assembling polypeptide encoded by the expressible nucleic acid sequence of the disclosure comprises at least about 70%, 75%, 80%, 85%, 86%, 87%, 88%, 89%, 90%, 91%, 92%, 93%, 94%, 95%, 96%, 97%, 98%, 99% or 100% sequence identity to SEQ ID NO: 8, SEQ ID NO: 10, SEQ ID NO: 12, SEQ ID NO: 14, SEQ ID NO: 16, SEQ ID NO: 18 or SEQ ID NO: 20, or a functional fragment or variant thereof. In some embodiments, the self-assembling polypeptide is encoded by a nucleic acid sequence comprises at least about 70%, 75%, 80%, 85%, 86%, 87%, 88%, 89%, 90%, 91%, 92%, 93%, 94%, 95%, 96%, 97%, 98%, 99% or 100% sequence identity to SEQ ID NO: 7, SEQ ID NO: 9, SEQ ID NO: 11, SEQ ID NO: 13, SEQ ID NO: 15, SEQ ID NO: 17 or SEQ ID NO: 19, or a functional fragment or variant thereof.

[0157] In some embodiments, the linker peptide encoded by the expressible nucleic acid sequence of the disclosure comprises at least about 70%, 75%, 80%, 85%, 86%, 87%, 88%, 89%, 90%, 91%, 92%, 93%, 94%, 95%, 96%, 97%, 98%, 99% or 100% sequence identity to SEQ ID NO: 22, SEQ ID NO: 23, SEQ ID NO: 24, SEQ ID NO: 25, SEQ ID NO: 26, SEQ ID NO: 32, SEQ ID NO: 34, SEQ ID NO: 36, SEQ ID NO: 38, SEQ ID NO: 40, SEQ ID NO: 42, SEQ ID NO: 44, SEQ ID NO: 46, SEQ ID NO: 48, SEQ ID NO: 50, SEQ ID NO: 52, SEQ ID NO: 54, SEQ ID NO: 56 or SEQ ID NO: 58, or a functional fragment or variant thereof. In some embodiments, the linker peptide is encoded by a nucleic acid sequence comprises at least about 70%, 75%, 80%, 85%, 86%, 87%, 88%, 89%, 90%, 91%, 92%, 93%, 94%, 95%, 96%, 97%, 98%, 99% or 100% sequence identity to SEQ ID NO: 21, SEQ ID NO: 27, SEQ ID NO: 28, SEQ ID NO: 29, SEQ ID NO: 30, SEQ ID NO: 31, SEQ ID NO: 33, SEQ ID NO: 35, SEQ ID NO: 37, SEQ ID NO: 39, SEQ ID NO: 41, SEQ ID NO: 43, SEQ ID NO: 45, SEQ ID NO: 47, SEQ ID NO: 49, SEQ ID NO: 51, SEQ ID NO: 53, SEQ ID NO: 55 or SEQ ID NO: 57 or a functional fragment or variant thereof.

[0158] In some embodiments, the viral antigen or monomer encoded by the expressible nucleic acid sequence of the disclosure comprises at least about 70%, 75%, 80%, 85%, 86%, 87%, 88%, 89%, 90%, 91%, 92%, 93%, 94%, 95%, 96%, 97%, 98%, 99% or 100% sequence identity to SEQ ID NO: 60, SEQ ID NO: 62, SEQ ID NO: 64, SEQ ID NO: 66, SEQ ID NO: 171, SEQ ID NO: 172, SEQ ID NO: 173, SEQ ID NO: 174, SEQ ID NO: 175, SEQ ID NO: 176 or SEQ ID NO: 177, or a functional fragment or variant thereof. In some embodiments, the viral antigen or monomer is encoded by a nucleic acid sequence comprises at least about 70%, 75%, 80%, 85%, 86%, 87%, 88%, 89%, 90%, 91%, 92%, 93%, 94%, 95%, 96%, 97%, 98%, 99% or 100% sequence identity to SEQ ID NO: 59, SEQ ID NO: 61, SEQ ID NO: 63 or SEQ ID NO: 65, or a functional fragment or variant thereof.

[0159] In some embodiments, the polypeptides encoded by the expressible nucleic acid molecule of the present disclosure comprises a furin cleavage site comprising at least about 70%, 75%, 80%, 85%, 86%, 87%, 88%, 89%, 90%, 91%, 92%, 93%, 94%, 95%, 96%, 97%, 98%, 99% or 100% sequence identity to SEQ ID NO: 67. In some embodiments, the polypeptides encoded by the expressible nucleic acid molecule of the present disclosure comprises a transmembrane domain comprising at least about 70%, 75%, 80%, 85%, 86%, 87%, 88%, 89%, 90%, 91%, 92%, 93%, 94%, 95%, 96%, 97%, 98%, 99% or 100% sequence identity to SEQ ID NO: 169. In some embodiments, the polypeptides encoded by the expressible nucleic acid molecule of the present disclosure comprises a foldon domain comprising at least about 70%, 75%, 80%, 85%, 86%, 87%, 88%, 89%, 90%, 91%, 92%, 93%, 94%, 95%, 96%, 97%, 98%, 99% or 100% sequence identity to SEQ ID NO: 170.

### D. Pharmaceutical Compositions

[0160] Disclosed are pharmaceutical compositions comprising any one or more of the disclosed compositions and a pharmaceutically acceptable carrier. Disclosed are pharmaceutical compositions comprising therapeutically effective amounts of any one or more of the disclosed compositions and a pharmaceutically acceptable carrier.

[0161] In some embodiments, any of the disclosed compositions is from about 1 to about 30 micrograms of the disclosed DNA and/or RNA vaccine. For example, any of the disclosed compositions can be from about 1 to about 5 micrograms the disclosed DNA and/or RNA vaccine. In some preferred embodiments, the pharmaceutical compositions contain from about 5 nanograms to about 800 micrograms of the disclosed DNA and/or RNA vaccine. In some preferred embodiments, the pharmaceutical compositions contain about 25 to about 250 micrograms, from about 100 to about 200 micrograms, from about 1 nanogram to 100 milligrams; from about 1 microgram to about 10 milligrams; from about 0.1 microgram to about 10 milligrams; from about 1 milligram to about 2 milligrams, from about 5 nanograms to about 1000 micrograms, from about 10 nanograms to about 800 micrograms, from about 0.1 to about 500 micrograms, from about 1 to about 350 micrograms, from about 25 to about 250 micrograms, from about 100 to about 200 micrograms of the DNA and/or RNA vaccine or plasmid thereof. The pharmaceutical compositions can comprise from about 5 nanograms to about 10 mg of the disclosed DNA and/or RNA vaccine. In some embodiments, pharmaceutical compositions according to the present disclosure comprise from about 25 nanograms to about 5 mg of the disclosed DNA and/or RNA vaccine. In some embodiments, the pharmaceutical compositions contain from about 50 nanograms to about 1 mg of the disclosed DNA and/or RNA vaccine. In some embodiments, the pharmaceutical compositions contain about from about 0.1 to about 500 micrograms of the disclosed DNA and/or RNA vaccine. In some embodiments, the pharmaceutical compositions contain from about 1 to about 350 micrograms of the disclosed DNA and/or RNA vaccine. In some embodiments, the pharmaceutical compositions contain from about 5 to about 250 micrograms of the disclosed DNA and/or RNA vaccine. In some embodiments, the pharmaceutical compositions contain from about 10 to about 200 micrograms of the disclosed DNA and/or RNA vaccine. In some embodiments, the pharmaceutical compositions contain from about 15 to about 150 micrograms of the disclosed DNA and/or RNA vaccine. In some embodiments, the pharmaceutical compositions contain about 20 to about 100 micrograms of the disclosed DNA and/or RNA vaccine. In some embodiments, the pharmaceutical compositions contain about 25 to about 75 micrograms of the disclosed DNA and/or RNA vaccine. In some embodiments, the pharmaceutical compositions contain about 30 to about 50 micrograms of the disclosed DNA and/or RNA vaccine. In some embodiments, the pharmaceutical compositions contain about 35 to about 40 micrograms of the disclosed DNA and/or RNA vaccine. In some embodiments, the pharmaceutical compositions contain about 100 to about 200 micrograms the disclosed DNA and/or RNA vaccine. In some embodiments, the pharmaceutical compositions comprise about 10 micrograms to about 100 micrograms of the disclosed DNA and/or RNA vaccine. In some embodiments, the pharmaceutical compositions comprise about 20 micrograms to about 80 micrograms of the disclosed DNA and/or RNA vaccine. In some embodiments, the pharmaceutical compositions comprise about 25 micrograms to about 60 micrograms of the disclosed DNA and/or RNA vaccine. In some embodiments, the pharmaceutical compositions comprise about 30 nanograms to about 50 micrograms of the disclosed DNA and/or RNA vaccine. In some embodiments, the pharmaceutical compositions comprise about 35 nanograms to about 45 micrograms of the disclosed DNA and/or RNA vaccine. In some preferred embodiments, the pharmaceutical compositions contain about 0.1 to about 500 micrograms of the disclosed DNA and/or RNA vaccine. In some preferred embodiments, the pharmaceutical compositions contain about 1 to about 350 micrograms of the disclosed DNA and/or RNA vaccine. In some preferred embodiments, the pharmaceutical compositions contain about 1 to about 250 micrograms of the disclosed DNA and/or RNA vaccine. In some preferred embodiments, the pharmaceutical compositions contain about 2 to about 200 micrograms the disclosed DNA and/or RNA vaccine.

[0162] In some embodiments, pharmaceutical compositions according to the present disclosure comprise at least about 10, 15, 20, 25, 30, 35, 40, 45, 50, 55, 60, 65, 70, 75, 80, 85, 90, 95 or 100 nanograms of the disclosed DNA and/or RNA vaccine. In some embodiments, the pharmaceutical compositions can comprise at least about 1, 5, 10, 15, 20, 25, 30, 35, 40, 45, 50, 55, 60, 65, 70, 75, 80, 85, 90, 95,100, 105, 110, 115, 120, 125, 130, 135, 140, 145, 150, 155, 160, 165, 170, 175, 180, 185, 190, 195, 200, 205, 210, 215, 220, 225, 230, 235, 240, 245, 250, 255, 260, 265, 270, 275, 280, 285, 290, 295, 300, 305, 310, 315, 320, 325, 330, 335, 340, 345, 350, 355, 360, 365, 370, 375, 380, 385, 390, 395, 400, 405, 410, 415, 420, 425, 430, 435, 440, 445, 450, 455, 460, 465, 470, 475, 480, 485, 490, 495, 500, 605, 610, 615, 620, 625, 630, 635, 640, 645, 650, 655, 660, 665, 670, 675, 680, 685, 690, 695, 700, 705, 710, 715, 720, 725, 730, 735, 740, 745, 750, 755, 760, 765, 770, 775, 780, 785, 790, 795, 800, 805, 810, 815, 820, 825, 830, 835, 840, 845, 850, 855, 860, 865, 870, 875, 880, 885, 890, 895, 900, 905, 910, 915, 920, 925, 930, 935, 940, 945, 950, 955, 960, 965, 970, 975, 980, 985, 990, 995 or 1000 micrograms of the disclosed DNA and/or RNA vaccine. In some embodiments, the pharmaceutical composition can comprise at least 1.5, 2, 2.5, 3, 3.5, 4, 4.5, 5, 5.5, 6, 6.5, 7, 7.5, 8, 8.5, 9, 9.5 or 10 mg or more of the disclosed DNA and/or RNA vaccine.

[0163] In other embodiments, the pharmaceutical composition can comprise up to and including about 10, 15, 20, 25, 30, 35, 40, 45, 50, 55, 60, 65, 70, 75, 80, 85, 90, 95 or 100 nanograms of the disclosed DNA and/or RNA vaccine. In some embodiments, the pharmaceutical composition can comprise up to and including about 1, 2, 3, 4, 5, 6, 7, 8, 9, 10, 15, 20, 25, 30, 35, 40, 45, 50, 55, 60, 65, 70, 75, 80, 85, 90, 95, 100, 105, 110, 115, 120, 125, 130, 135, 140, 145, 150, 155, 160, 165, 170, 175, 180, 185, 190, 195, 200, 205, 210, 215, 220, 225, 230, 235, 240, 245, 250, 255, 260, 265, 270, 275, 280, 285, 290, 295, 300, 305, 310, 315, 320, 325, 330, 335, 340, 345, 350, 355, 360, 365, 370, 375, 380, 385, 390, 395, 400, 405, 410, 415, 420, 425, 430, 435, 440, 445, 450, 455, 460, 465, 470, 475, 480, 485, 490, 495, 500, 605, 610, 615, 620, 625, 630, 635, 640, 645, 650, 655, 660, 665, 670, 675, 680, 685, 690, 695, 700, 705, 710, 715, 720, 725, 730, 735, 740, 745, 750, 755, 760, 765, 770, 775, 780, 785, 790, 795, 800, 805, 810, 815, 820, 825, 830, 835, 840, 845, 850, 855, 860, 865, 870, 875, 880, 885, 890, 895, 900, 905, 910, 915, 920, 925, 930, 935, 940, 945, 950, 955, 960, 965, 970, 975, 980, 985, 990, 995, or 1000 micrograms of the disclosed DNA and/or RNA vaccine. In some embodiments, the pharmaceutical composition can comprise up to and including about 1.5, 2, 2.5, 3, 3.5, 4, 4.5, 5, 5.5, 6, 6.5, 7, 7.5, 8, 8.5, 9, 9.5 or about 10 mg of the disclosed DNA and/or RNA vaccine. The pharmaceutical composition can further comprise other agents for formulation purposes according to the mode of administration to be used. In cases where pharmaceutical compositions are injectable pharmaceutical compositions, they are sterile, pyrogen free and particulate free. An isotonic formulation is preferably used. Generally, additives for isotonicity can include sodium chloride, dextrose, mannitol, sorbitol and lactose. In some cases, isotonic solutions such as phosphate buffered saline are preferred. Stabilizers include gelatin and albumin. In some embodiments, a vasoconstriction agent is added to the formulation.

[0164] The vaccine can further comprise a pharmaceutically acceptable excipient. The pharmaceutically acceptable excipient can be functional molecules as vehicles, adjuvants, carriers, or diluents. The pharmaceutically acceptable excipient can be a transfection facilitating agent, which can include surface active agents, such as immune-stimulating complexes (ISCOMS), Freunds incomplete adjuvant, LPS analog including monophosphoryl lipid A, muramyl peptides, quinone analogs, vesicles such as squalene and squalene, hyaluronic acid, lipids, liposomes, calcium ions, viral proteins, polyanions, polycations, or other known transfection facilitating agents. In some embodiments, the vaccine is a composition comprising a plasmid DNA molecule, RNA molecule or DNA/RNA hybrid molecule encoding an expressible nucleic acid sequence, the expressible nucleic acid sequence comprising a first nucleic acid encoding a self-assembling nanoparticle comprising a viral antigen, optionally encoding a leader sequence disclosed herein.

[0165] The transfection facilitating agent is a polyanion, polycation, including poly-L-glutamate (LGS), or lipid. The transfection facilitating agent is poly-L-glutamate, and more preferably, the poly-L-glutamate is present in the vaccine at a concentration less than 6 mg/ml. The transfection facilitating agent can also include surface active agents such as immune-stimulating complexes (ISCOMS), Freunds incomplete adjuvant, LPS analog including monophosphoryl lipid A, muramyl peptides, quinone analogs and vesicles such as squalene and squalene, and hyaluronic acid can also be used administered in conjunction with the genetic construct. In some embodiments, the DNA vector vaccines can also include a transfection facilitating agent such as lipids, liposomes, including lecithin liposomes or other liposomes known in the art, as a DNA-liposome mixture (see for example WO9324640), calcium ions, viral proteins, polyanions, polycations, or nanoparticles, or other known transfection facilitating agents. In some embodiments, the transfection facilitating agent is a polyanion, polycation, including poly-L-glutamate (LGS), or lipid. Concentration of the transfection agent in the vaccine is less than about 4 mg/ml, less than about 2 mg/ml, less than about 1 mg/ml, less than about 0.750 mg/ml, less than about 0.500 mg/ml, less than about 0.250 mg/ml, less than about 0.100 mg/ml, less than about 0.050 mg/ml, or less than about 0.010 mg/ml.

[0166] The pharmaceutically acceptable excipient can be an adjuvant. The adjuvant can be other genes that are expressed in alternative plasmid or are deneurological systemed as proteins in combination with the plasmid above in the vaccine. The adjuvant can be selected from: α-interferon(IFN-α), β-interferon (IFN-β), γ-interferon, platelet derived growth factor (PDGF), TNFα, TNFβ, GM-CSF, epidermal growth factor (EGF), cutaneous T cell-attracting chemokine (CTACK), epithelial thymus-expressed chemokine (TECK), mucosae-associated epithelial chemokine (MEC), IL-12, IL-15, MHC, CD80, CD86 including IL-15 having the signal sequence deleted and optionally including the signal peptide from IgE. The adjuvant can be IL-12, IL-15, IL-28, CTACK, TECK, platelet derived growth factor (PDGF), TNFα, TNFβ, GM-CSF, epidermal growth factor (EGF), IL-1, IL-2, IL-4, IL-5, IL-6, IL-10, IL-12, IL-18, or a combination thereof. In an exemplary embodiment, the adjuvant is IL-12.

[0167] Other genes which can be useful adjuvants include those encoding: MCP-1, MIP-1a, MIP-1p, IL-8, RANTES, L-selectin, P-selectin, E-selectin, CD34, GlyCAM-1, MadCAM-1, LFA-1, VLA-1, Mac-1, p150.95, PECAM, ICAM-1, ICAM-2, ICAM-3, CD2, LFA-3, M-CSF, G-CSF, IL-4, mutant forms of IL-18, CD40, CD40L, vascular growth factor, fibroblast growth factor, IL-7, nerve growth factor, vascular endothelial growth factor, Fas, TNF receptor, Fit, Apo-1, p55, WSL-1, DR3, TRAMP, Apo-3, AIR, LARD, NGRF, DR4, DR5, KILLER, TRAIL-R2, TRICK2, DR6, Caspase ICE, Fos, c-jun, Sp-1, Ap-1, Ap-2, p38, p65Rel, MyD88, IRAK, TRAF6, IkB, Inactive NIK, SAP K, SAP-1, JNK, interferon response genes, NFkB, Bax, TRAIL, TRAILrec, TRAILrecDRCS, TRAIL-R3, TRAIL-R4, RANK, RANK LIGAND, Ox40, Ox40 LIGAND, NKG2D, MICA, MICB, NKG2A, NKG2B, NKG2C, NKG2E, NKG2F, TAP1, TAP2 and functional fragments thereof or a combination thereof.

[0168] In some embodiments adjuvant may be one or more proteins and/or nucleic acid molecules that encode proteins selected from the group consisting of: CCL-20, IL-12, IL-15, IL-28, CTACK, TECK, MEC or RANTES. Examples of IL-12 constructs and sequences are disclosed in PCT application No. PCT/US1997/019502 (published as WO98/017799) and corresponding U.S. application Ser. No. 08/956,865, and U.S. Provisional Application No. 61/569,600 filed Dec. 12, 2011, which are each incorporated herein by reference in their entireties. Examples of IL-15 constructs and sequences are disclosed in PCT application No. PCT/US04/18962 (published as WO2005/000235) and corresponding U.S. application Ser. No. 10/560,650, and in PCT application No. PCT/US07/00886 (published as WO2007/087178) and corresponding U.S. application Ser. No. 12/160,766, and in PCT Application Serial No. PCT/US10/048827 (published as WO2011/032179), which are each incorporated herein by reference in their entireties. Examples of IL-28 constructs and sequences are disclosed in PCT application no. PCT/US09/039648 (published as WO2009/124309) and corresponding U.S. application Ser. No. 12/936,192, which are each incorporated herein by reference in their entireties. Examples of RANTES and other constructs and sequences are disclosed in PCT application No. PCT/US 1999/004332 (published as WO99/043839) and corresponding U.S. application Ser. No. 09/622,452, which are each incorporated herein by reference in their entieties. Other examples of RANTES constructs and sequences are disclosed in PCT Application No. PCT/US Ser. No. 11/024,098 (published as WO2011/097640), which is incorporated herein by reference. Examples of RANTES and other constructs and sequences are disclosed in PCT Application No. PCT/US 1999/004332 and corresponding U.S. application Ser. No. 09/622,452, which are each incorporated herein by reference. Other examples of RANTES constructs and sequences are disclosed in PCT application No. PCT/US11/024098 (published as WO2011/097640), which is incorporated herein by reference in its entirety. Examples of chemokines CTACK, TECK and MEC constructs and sequences are disclosed in PCT Application No. PCT/US2005/042231 (published as WO2007/050095) and corresponding U.S. application Ser. No. 11/719,646, which are each incorporated herein by reference in their entireties. Examples of OX40 and other immunomodulators are disclosed in U.S. application Ser. No. 10/560,653, which is incorporated herein by reference in its entirety. Examples of DR5 and other immunomodulators are disclosed in U.S. application Ser. No. 09/622,452, which is incorporated herein by reference in its entirety.

[0169] The pharmaceutial compoistion may be formulated according to the mode of administration to be used. An injectable vaccine pharmaceutical composition may be sterile, pyrogen free and particulate free. An isotonic formulation or solution may be used. Additives for isotonicity may include sodium chloride, dextrose, mannitol, sorbitol, and lactose. The vaccine may comprise a vasoconstriction agent. The isotonic solutions may include phosphate buffered saline. Vaccine may further comprise stabilizers including gelatin and albumin. The stabilizing may allow the formulation to be stable at room or ambient temperature for extended periods of time such as LGS or polycations or polyanions to the vaccine formulation.

[0170] The vaccine can be a DNA or RNA vaccine. In some embodiments, the vaccine is a DNA vaccine. DNA vaccines are disclosed in U.S. Pat. Nos. 5,593,972, 5,739,118, 5,817,637, 5,830,876, 5,962,428, 5,981,505, 5,580,859, 5,703,055, and 5,676,594, which are incorporated herein fully by reference. The DNA vaccine can further comprise elements or reagents that inhibit it from integrating into the chromosome. Examples of attenuated live vaccines, those using recombinant vectors to foreign antigens, subunit vaccines and glycoprotein vaccines are described in U.S. Pat. Nos. 4,510,245; 4,797,368; 4,722,848; 4,790,987; 4,920,209; 5,017,487; 5,077,044; 5,110,587; 5,112,749; 5,174,993; 5,223,424; 5,225,336; 5,240,703; 5,242,829; 5,294,441; 5,294,548; 5,310,668; 5,387,744; 5,389,368; 5,424,065; 5,451,499; 5,453,364; 5,462,734; 5,470,734; 5,474,935; 5,482,713; 5,591,439; 5,643,579; 5,650,309; 5,698,202; 5,955,088; 6,034,298; 6,042,836; 6,156,319 and 6,589,529, which are each incorporated herein by reference in their entireties. In other embodiments, the vaccine is a RNA vaccine. RNA vaccines are disclosed in, for example, U.S. Pat. Nos. 10,064,934; 10,064,935; 10,124,055; 10,238,731; 10,272,150; 10,383,937; 10,449,244; 10,517,940; 10,543,269; 10,675,342; 10,702,597; 10,702,599; and 10,716,846; and U.S. Application Publication Nos. 2011/0033416; 2014/0134129; 2017/0136121; 2018/0344838; 2020/0016274; 2020/0030432; 2020/0405844; and 2021/0046173, which are each incorporated herein by reference in their entireties.

[0171] In some embodiments, the vaccine is a lipid nanoparticles (LNP) comprising one or a modified RNA molecule. In some embodiments, the vaccine comprises a modified mRNA. Modified polynucleotides (such as, but not limited to, primary constructs), formulations and compositions comprising modified polynucleotides, and methods of making, using and administering modified polynucleotides are described in U.S. Provisional Patent Application Nos. 61/618,862; 61/681,645; 61/737,130; 61/618,866; 61/681,647; 61/737,134; 61/618,868; 61/681,648; 61/737,135; 61/618,873; 61/681,650; 61/737,147; 61/618,878; 61/681,654; 61/737,152; 61/618,885; 61/681,658; 61/737,155; 61/618,896; 61/668,157; 61/681,661; 61/737,160; 61/618,911; 61/681,667; 61/737,168; 61/618,922; 61/681,675; 61/737,174; 61/618,935; U61/681,687; 61/737,184; 61/618,945; 61/681,696; 61/737,191; 61/618,953; 61/681,704; 61/737,203; 61/681,720; 61/737,213; 61/681,742; 61/618,870; 61/681,649; and 61/737,139; and International Application Nos. PCT/US2013/030062; PCT/US2013/030064; PCT/US2013/030059; PCT/US2013/030066; PCT/US2013/030067; PCT/US2013/030060; PCT/US2013/030061; PCT/US2013/030070; PCT/US2013/030068; PCT/US2013/030063; and PCT/US2013/031821, the contents of each of which are herein incorporated by reference in their entireties. Any of the recited polypeptides of the modified polynucleotides of the foregoing are considered useful as a polypeptide of interest or antigen of the LNPs of the present disclosure.

[0172] The genetic construct can also be part of a genome of a recombinant viral vector, including recombinant adenovirus, recombinant adenovirus associated virus and recombinant vaccinia. The genetic construct can be part of the genetic material in attenuated live microorganisms or recombinant microbial vectors which live in cells.

[0173] In some embodiments, the disclosure relates to a DNA vector pVAX1 comprising any one or more of the expressible nucliec acid sequences disclosed herein or an RNA transcript thereof. In some embodiments, the disclosure relates to a pharmaceuical composition comprising a nucleic acid sequencethat includes one or a plurality of the expressible nucleic acid sequences discloed herein or an RNA transcript thereof, and a pharmaceutically acceptable carrier.

### E. Methods

[0174] Provided herein are compositions (e.g., pharmaceutical compositions), methods, kits and reagents for prevention and/or treatment of an infection of a virus from the family of Coronaviridae, particularly a coronavirus infection, in humans and other mammals. Virus vaccines can be used as therapeutic or prophylactic agents. They may be used in medicine to prevent and/or treat infectious disease. In exemplary aspects, the vaccines of the present disclosure are used to provide prophylactic protection from coronavirus. Prophylactic protection from coronavirus can be achieved following administration of a prophylactically effective dose of a coronavirus DNA or RNA vaccine of the present disclosure. A prophylactically effective dose is a therapeutically effective dose that prevents infection with the virus at a clinically acceptable level. In some embodiments, the therapeutically effective dose is a dose listed in a package insert for the vaccine. Vaccines can be administered once, twice, three times, four times or more. It is possible, although less desirable, to administer the vaccine to an infected individual to achieve a therapeutic response. Dosing may need to be adjusted accordingly.

[0175] In some embodiments, disclosed are methods of vaccinating a subject comprising administering a therapeutically effective amount of any of the disclosed nucleic acid molecules, compositions, pharmaceutical compositions, cells or vaccines to the subject. In some embodiments, the vaccination is against viral infection. In some embodiments, the viral infection is an infection of a virus from the family of Coronaviridae. In some embodiments, the viral infection is an infection of a coronavirus. In some embodiments, the viral infection is an infection of SARS-CoV. In some embodiments, the viral infection is an infection of HCoV NL63. In some embodiments, the viral infection is an infection of HKU1. In some embodiments, the viral infection is an infection of MERS-CoV. In some embodiments, the viral infection is an infection of SARS-CoV-2.

[0176] In some embodiments, disclosed are methods of inducing an immune response in a subject comprising administering to the subject any of the disclosed pharmaceutical compositions. In some embodiments, the methods are for inducing an immune response against a viral antigen in the subject. In some embodiments, the immune response induced by the disclosed methods is against a viral antigen from a virus from the family of Coronaviridae. In some embodiments, the immune response induced by the disclosed methods is against a viral antigen from a coronavirus. In some embodiments, the immune response induced by the disclosed methods is against a viral antigen from SARS-CoV. In some embodiments, the immune response induced by the disclosed methods is against a viral antigen from HCoV NL63. In some embodiments, the immune response induced by the disclosed methods is against a viral antigen from HKU1. In some embodiments, the immune response induced by the disclosed methods is against a viral antigen from MERS-CoV. In some embodiments, the immune response induced by the disclosed methods is against a viral antigen from SARS-CoV-2.

[0177] In some embodiments, disclosed are methods of neutralizing one or a plurality of viruses in a subject comprising administering to the subject any of the disclosed pharmaceutical compositions. In some embodiments, the virus being neutralized by the disclosed method is a virus from the family of Coronaviridae. In some embodiments, the virus being neutralized by the disclosed method is a coronavirus. In some embodiments, the virus being neutralized by the disclosed method is SARS-CoV. In some embodiments, the virus being neutralized by the disclosed method is HCoV NL63. In some embodiments, the virus being neutralized by the disclosed method is HKU1. In some embodiments, the virus being neutralized by the disclosed method is MERS-CoV. In some embodiments, the virus being neutralized by the disclosed method is SARS-CoV-2.

[0178] In some embodiments, disclosed are methods of neutralizing infection of one or a plurality of viruses in a subject comprising administering to the subject any of the disclosed pharmaceutical compositions. In some embodiments, the viral infection being neutralized by the disclosed method is an infection of a virus from the family of Coronaviridae. In some embodiments, the viral infection being neutralized by the disclosed method is an infection of coronavirus. In some embodiments, the viral infection being neutralized by the disclosed method is an infection of SARS-CoV. In some embodiments, the viral infection being neutralized by the disclosed method is an infection of HCoV NL63. In some embodiments, the viral infection being neutralized by the disclosed method is an infection of HKU1. In some embodiments, the viral infection being neutralized by the disclosed method is an infection of MERS-CoV. In some embodiments, the viral infection being neutralized by the disclosed method is an infection of SARS-CoV-2.

[0179] In some embodiments, disclosed are methods of stimulating a therapeutically effective antigen-specific immune response against a virus in a mammal infected with the virus comprising administering any of the disclosed pharmaceutical compositions. In some embodiments, the disclosed method is a method of stimulating a therapeutically effective antigen-specific immune response against a virus from the family of Coronaviridae. In some embodiments, the disclosed method is a method of stimulating a therapeutically effective antigen-specific immune response against a coronavirus. In some embodiments, the disclosed method is a method of stimulating a therapeutically effective antigen-specific immune response against SARS-CoV. In some embodiments, the disclosed method is a method of stimulating a therapeutically effective antigen-specific immune response against HCoV NL63. In some embodiments, the disclosed method is a method of stimulating a therapeutically effective antigen-specific immune response against HKU1. In some embodiments, the disclosed method is a method of stimulating a therapeutically effective antigen-specific immune response against MERS-CoV. In some embodiments, the disclosed method is a method of stimulating a therapeutically effective antigen-specific immune response against SARS-CoV-2.

[0180] In some embodiments, disclosed are methods of inducing expression of a self-assembling vaccine in a subject comprising administering any of the disclosed pharmaceutical compositions. Also disclosed are methods of treating a subject having a viral infection or susceptible to becoming infected with a virus comprising administering to the subject a therapeutically effective amount of any of the disclosed pharmaceutical compositions. In some embodiments, the viral infection is an infection of a virus from the family of Coronaviridae. In some embodiments, the viral infection is an infection of coronavirus. In some embodiments, the viral infection is an infection of SARS-CoV. In some embodiments, the viral infection is an infection of HCoV NL63. In some embodiments, the viral infection is an infection of HKU1. In some embodiments, the viral infection is an infection of MERS-CoV. In some embodiments, the viral infection is an infection of SARS-CoV-2.

[0181] The disclosed pharmaceutical compositions may be administered by any route of administration. Accordingly, in some embodiments, the administration is accomplished by oral administration. In some embodiments, the administration is accomplished by parenteral administration. In some embodiments, the administration is accomplished by sublingual administration. In some embodiments, the administration is accomplished by transdermal administration. In some embodiments, the administration is accomplished by rectal administration. In some embodiments, the administration is accomplished by transmucosal administration. In some embodiments, the administration is accomplished by topical administration. In some embodiments, the administration is accomplished by inhalation. In some embodiments, the administration is accomplished by buccal administration. In some embodiments, the administration is accomplished by intrapleural administration. In some embodiments, the administration is accomplished by intravenous administration. In some embodiments, the administration is accomplished by intraarterial administration. In some embodiments, the administration is accomplished by intraperitoneal administration. In some embodiments, the administration is accomplished by subcutaneous administration. In some embodiments, the administration is accomplished by intramuscular administration. In some embodiments, the administration is accomplished by intranasal administration. In some embodiments, the administration is accomplished by intrathecal administration. In some embodiments, the administration is accomplished by intraarticular administration. In some embodiments, the administration is accomplished by intradermal administration. In some embodiments, the above modes of action are accomplished by injection of the pharmaceutical compositions disclosed herein.

[0182] In some embodiments, the therapeutically effective dose can be from about 1 to about 30 micrograms of expressible nucleic acid sequence. In some embodiments, the therapeutically effective dose can be from about 0.001 micrograms of the composition per kilogram of subject to about 0.050 micrograms per kilogram of subject.

[0183] In some embodiments, any of the disclosed methods can be free of activating any mannose-binding lectin or complement process. In some embodiments, any of the disclosed methods is performed without inducing the MBL-complement pathway.

[0184] In some embodiments, the subject can be a human. In some embodiments, the subject is diagnosed with or suspected of having a viral infection. In some embodiments, the subject is diagnosed with or suspected of having an infection of a virus from the family of Coronaviridae. In some embodiments, the subject is diagnosed with or suspected of having an infection of coronavirus. In some embodiments, the subject is diagnosed with or suspected of having an infection of SARS-CoV. In some embodiments, the subject is diagnosed with or suspected of having an infection of HCoV NL63. In some embodiments, the subject is diagnosed with or suspected of having an infection of HKU1. In some embodiments, the subject is diagnosed with or suspected of having an infection of MERS-CoV. In some embodiments, the subject is diagnosed with or suspected of having an infection of SARS-CoV-2.

[0185] In some embodiments of the methods of inducing an immune response, the immune response can be an antigen-specific imune response. In some embodiments, the antigen-specific immune response can be an antigen-specific to SARS-CoV-2 antigen immune response. In some embodiments, the antigen-specific immune response can be a therapeutically effective CD-4+ antigen-specific SARS-CoV-2 immune response. In some embodiments, the antigen-specific immune response can be a therapeutically effective CD-8+ antigen-specific SARS-CoV-2 immune response. In some embodiments, the antigen-specific immune response can be a therapeutically effective CD-4+ and CD-8+ antigen-specific SARS-CoV-2 immune response.

[0186] In some embodiments, the methods are free of administering any polypeptide directly to the subject.

[0187] In some embodiments, any of the disclosed methods can further comprise administering to the subject a pharmaceutical composition comprising one or more pharmaceutically active agents, such as antiviral drugs, among many others. In some embodiments, the one or more pharmaceutically active agents include other anticoronarival medications used to inhibit coronavirus, for example nucleoside analog reverse transcriptase inhibitors, non-nucleoside reverse transcriptase inhibitors, and protease inhibitors. Among the available drugs that may be used as a pharmaceutically active agent are zidovudine or AZT (or Retrovir®), didanosine or DDI (or Videx®), stavudine or D4T (or Zerit®), lamivudine or 3TC (or Epivir®), zalcitabine or DDC (or Hivid®), abacavir succinate (or Ziagen″), tenofovir disoproxil fumarate salt (or Viread®), emtricitabine (or Emtriva®), Combivir® (contains 3TC and AZT), Trizivir® (contains abacavir, 3TC and AZT); three non-nucleoside reverse transcriptase inhibitors: nevirapine (or Viramune®), delavirdine (or Rescriptor®) and efavirenz (or Sustiva®), eight peptidomimetic protease inhibitors or approved formulations: saquinavir (or Invirase® or Fortovase″), indinavir (or Crixivan®), ritonavir (or Norvir®), nelfinavir (or Viracept″), amprenavir (or Agenerase®), atazanavir (Reyataz), fosamprenavir (or Lexiva), Kaletra®(contains lopinavir and ritonavir), and one fusion inhibitor enfuvirtide (or T-20 or Fuzeon®).

[0188] In some embodiments, the methods of inducing an immune response can include inducing a humoral or cellular immune response. A humoral immune response mainly refers to antibody production. A cellular immune response can include activation of CD4+ T-cells and activation CD8+ cells and associated cytotoxic activity. In one aspect, the present disclosure features a method of inducing an immune response in a subject, the method comprising administering to the subject in need thereof a pharmaceutically effective amount of any of the nucleic acid molecules comprising any one or a plurality of the disclosed expressible nucleic acid sequences or embodiments herein, or any one of the pharmaceutical compositions disclosed herein. In one aspect, the present disclosure features a method of inducing a CD8+ T cell immune response in a subject, the method comprising administering to the subject in need thereof a pharmaceutically effective amount of any of the nucleic acid molecules comprising any one or a plurality of the disclosed expressible nucleic acid sequences or embodiments herein, or any one of the pharmaceutical compositions disclosed herein.

[0189] In one aspect, the present disclosure features a method of enhancing an immune response in a subject, the method comprising administering to the subject in need thereof a pharmaceutically effective amount of any of the nucleic acid molecules comprising any one or a plurality of the disclosed expressible nucleic acid sequences or embodiments herein, or any one of the pharmaceutical compositions disclosed herein.

[0190] In one aspect, the present disclosure features a method of enhancing a CD8+ T cell immune response in a subject, the method comprising administering to the subject in need thereof a pharmaceutically effective amount of any of the nucleic acid molecules comprising any one or a plurality of the disclosed expressible nucleic acid sequences or embodiments herein, or any one of the pharmaceutical compositions disclosed herein.

[0191] In some embodiments, the subject has a viral infection and is in need of therapy for the viral infection. In some embodiments, the viral infection is an infection of a virus from the family of Coronaviridae. In some embodiments, the viral infection is an infection of coronavirus. In some embodiments, the viral infection is an infection of SARS-CoV. In some embodiments, the viral infection is an infection of HCoV NL63. In some embodiments, the viral infection is an infection of HKU1. In some embodiments, the viral infection is an infection of MERS-CoV. In some embodiments, the viral infection is an infection of SARS-CoV-2.

[0192] In some embodiments, the subject has previously been treated, and not responded to anti-viral therapy. In some embodiments, the nucleic acid molecule and/or the expressible nucleic acid sequence of the disclosure is administered to the subject by electroporation.

[0193] The vaccine may be administered by different routes including orally, parenterally, sublingually, transdermally, rectally, transmucosally, topically, via inhalation, via buccal administration, intrapleurally, intravenous, intraarterial, intraperitoneal, subcutaneous, intramuscular, intranasal intrathecal, and intraarticular or combinations thereof. For veterinary use, the composition may be administered as a suitably acceptable formulation in accordance with normal veterinary practice. The veterinarian can readily determine the dosing regimen and route of administration that is most appropriate for a particular animal. The vaccine may be administered by traditional syringes, needleless injection devices, “microprojectile bombardment gone guns,” or other physical methods such as electroporation (“EP”), “hydrodynamic method,” or ultrasound.

[0194] The plasmid of the vaccine may be delivered to the mammal by several well-known technologies including DNA injection (also referred to as DNA vaccination) with and without in vivo electroporation, liposome mediated, nanoparticle facilitated, recombinant vectors such as recombinant adenovirus, recombinant adenovirus associated virus and recombinant vaccinia. The antigen may be delivered via DNA injection and along with in vivo electroporation.

[0195] The vaccine or pharmaceutical composition can be administered by electroporation. Administration of the vaccine via electroporation of the plasmids of the vaccine may be accomplished using electroporation devices that can be configured to deliver to a desired tissue of a mammal a pulse of energy effective to cause reversible pores to form in cell membranes, and preferable the pulse of energy is a constant current similar to a preset current input by a user. The electroporation device may comprise an electroporation component and an electrode assembly or handle assembly. The electroporation component may include and incorporate one or more of the various elements of the electroporation devices, including controller, current waveform generator, impedance tester, waveform logger, input element, status reporting element, communication port, memory component, power source, and power switch. The electroporation can be accomplished using an in vivo electroporation device, for example CELLECTRA® EP system (Inovio Pharmaceuticals, Inc., Blue Bell, Pa.) or Elgen electroporator (Inovio Pharmaceuticals, Inc.) to facilitate transfection of cells by the plasmid.

[0196] The electroporation component may function as one element of the electroporation devices, and the other elements are separate elements (or components) in communication with the electroporation component. The electroporation component may function as more than one element of the electroporation devices, which may be in communication with still other elements of the electroporation devices separate from the electroporation component. The elements of the electroporation devices existing as parts of one electromechanical or mechanical device may not limited as the elements can function as one device or as separate elements in communication with one another. The electroporation component may be capable of delivering the pulse of energy that produces the constant current in the desired tissue, and includes a feedback mechanism. The electrode assembly may include an electrode array having a plurality of electrodes in a spatial arrangement, wherein the electrode assembly receives the pulse of energy from the electroporation component and delivers the same to the desired tissue through the electrodes. At least one of the plurality of electrodes is neutral during delivery of the pulse of energy and measures impedance in the desired tissue and communicates the impedance to the electroporation component. The feedback mechanism may receive the measured impedance and can adjust the pulse of energy delivered by the electroporation component to maintain the constant current.

[0197] A plurality of electrodes may deliver the pulse of energy in a decentralized pattern. The plurality of electrodes may deliver the pulse of energy in the decentralized pattern through the control of the electrodes under a programmed sequence, and the programmed sequence is input by a user to the electroporation component. The programmed sequence may comprise a plurality of pulses delivered in sequence, wherein each pulse of the plurality of pulses is delivered by at least two active electrodes with one neutral electrode that measures impedance, and wherein a subsequent pulse of the plurality of pulses is delivered by a different one of at least two active electrodes with one neutral electrode that measures impedance.

[0198] The feedback mechanism may be performed by either hardware or software. The feedback mechanism may be performed by an analog closed-loop circuit. The feedback occurs every 50 μs, 20 μs, 10 μs or 1 μs, but is preferably a real-time feedback or instantaneous (i.e., substantially instantaneous as determined by available techniques for determining response time). The neutral electrode may measure the impedance in the desired tissue and communicates the impedance to the feedback mechanism, and the feedback mechanism responds to the impedance and adjusts the pulse of energy to maintain the constant current at a value similar to the preset current. The feedback mechanism may maintain the constant current continuously and instantaneously during the delivery of the pulse of energy.

[0199] Examples of electroporation devices and electroporation methods that may facilitate delivery of the DNA vaccines of the present disclosure, include those described in U.S. Pat. No. 7,245,963 by Draghia-Akli, et al., U.S. Patent Pub. 2005/0052630 submitted by Smith, et al., the contents of which are hereby incorporated by reference in their entirety. Other electroporation devices and electroporation methods that may be used for facilitating delivery of the DNA vaccines include those provided in co-pending and co-owned U.S. patent application Ser. No. 11/874,072, filed Oct. 17, 2007, which claims the benefit under 35 USC 119(e) to U.S. Provisional Applications Ser. No. 60/852,149, filed Oct. 17, 2006, and 60/978,982, filed Oct. 10, 2007, all of which are hereby incorporated in their entirety.

[0200] U.S. Pat. No. 7,245,963 by Draghia-Akli, et al. describes modular electrode systems and their use for facilitating the introduction of a biomolecule into cells of a selected tissue in a body or plant. The modular electrode systems may comprise a plurality of needle electrodes; a hypodermic needle; an electrical connector that provides a conductive link from a programmable constant-current pulse controller to the plurality of needle electrodes; and a power source. An operator can grasp the plurality of needle electrodes that are mounted on a support structure and firmly insert them into the selected tissue in a body or plant. The biomolecules are then delivered via the hypodermic needle into the selected tissue. The programmable constant-current pulse controller is activated and constant-current electrical pulse is applied to the plurality of needle electrodes. The applied constant-current electrical pulse facilitates the introduction of the biomolecule into the cell between the plurality of electrodes. The entire content of U.S. Pat. No. 7,245,963 is hereby incorporated by reference in its entirety.

[0201] U.S. Patent Pub. 2005/0052630 submitted by Smith, et al. describes an electroporation device which may be used to effectively facilitate the introduction of a biomolecule into cells of a selected tissue in a body or plant. The electroporation device comprises an electro-kinetic device (“EKD device”) whose operation is specified by software or firmware. The EKD device produces a series of programmable constant-current pulse patterns between electrodes in an array based on user control and input of the pulse parameters, and allows the storage and acquisition of current waveform data. The electroporation device also comprises a replaceable electrode disk having an array of needle electrodes, a central injection channel for an injection needle, and a removable guide disk. The entire content of U.S. Patent Pub. 2005/0052630 is hereby incorporated by reference in its entirety. The electrode arrays and methods described in U.S. Pat. No. 7,245,963 and U.S. Patent Pub. 2005/0052630 may be adapted for deep penetration into not only tissues such as muscle, but also other tissues or organs. Because of the configuration of the electrode array, the injection needle (to deliver the biomolecule of choice) is also inserted completely into the target organ, and the injection is administered perpendicular to the target issue, in the area that is pre-delineated by the electrodes. The electrodes described in U.S. Pat. No. 7,245,963 and U.S. Patent Pub. 2005/005263 are preferably 20 mm long and 21 gauge.

[0202] Additionally, contemplated in some embodiments that incorporate electroporation devices and uses thereof, there are electroporation devices that are those described in U.S. Pat. Nos. 5,273,525; 6,110,161; 6,261,281; 6,958,060; and 6,939,862. Furthermore, patents covering subject matter provided in U.S. Pat. No. 6,697,669, which concerns delivery of DNA using any of a variety of devices, and U.S. Pat. No. 7,328,064, drawn to a method of injecting DNA, are contemplated herein. The above patents are incorporated by reference in their entireties.

[0203] Methods of preparing the nucleic acid molecules are disclosed. In some embodiments, plasmids with one or more multiple cloning sites may be purchased from commercially available vendors and the expressible nucleic acids disclosed herein may be ligated into the plasmids after a digestion with a known restriction enzyme needed to cut the plasmid DNA. In another alternative embodiment, membrane-based purification methods disclosed herein offer reduced cost, high binding capacity, and high flow rates, resulting in a superior purification process. The purification process is further demonstrated to produce plasmid products substantially free of genomic DNA, RNA, protein, and endotoxin.

[0204] In some embodiments, all of the described aspects of the present disclosure are advantageously combined to provide an integrated process for preparing substantially purified cellular components of interest from cells in bioreactors. Again, the cells are most preferably plasmid-containing cells, and the cellular components of interest are most preferably plasmids. The substantially purified plasmids are suitable for various uses, including, but not limited to, gene therapy, plasmid-mediated therapy, as DNA vaccines for human, veterinary, or agricultural use, or for any other application that requires large quantities of purified plasmid. In this aspect, all of the advantages described for individual aspects of the present disclosure accrue to the complete, integrated process, providing a highly advantageous method that is rapid, scalable, and inexpensive. Enzymes and other animal-derived or biologically sourced products are avoided, as are carcinogenic, mutagenic, or otherwise toxic substances. Potentially flammable, explosive, or toxic organic solvents are similarly avoided.

[0205] One aspect of the present disclosure is an apparatus for isolating plasmid DNA from a suspension of cells having both plasmid DNA and genomic DNA. An embodiment of the apparatus comprises a first tank and second tank in fluid communication with a mixer. The first tank is used for holding the suspension cells and the second tank is used for holding a lysis solution. The suspension of cells from the first tank and the lysis solution from the second tank are both allowed to flow into the mixer forming a lysate mixture or lysate fluid. The mixer comprises a high shear, low residence-time mixing device with a residence time of equal to or less than about 1 second. In a preferred embodiment, the mixing device comprises a flow through, rotor/stator mixer or emulsifier having linear flow rates from about 0.1 L/min to about 20 L/min. The lysate-mixture flows from the mixer into a holding coil for a period of time sufficient to lyse the cells and forming a cell lysate suspension, wherein the lysate-mixture has resident time in the holding coil in a range of about 2-8 minutes with a continuous linear flow rate.

[0206] The cell lysate suspension is then allowed to flow into a bubble-mixer chamber for precipitation of cellular components from the plasmid DNA. In the bubble mixer chamber, the cell lysate suspension and a precipitation solution or a neutralization solution from a third tank are mixed together using gas bubbles, which forms a mixed gas suspension comprising a precipitate and an unclarified lysate or plasmid containing fluid. The precipitate of the mixed gas suspension is less dense than the plasmid containing fluid, which facilitates the separation of the precipitate from the plasmid containing fluid. The precipitate is removed from the mixed gas suspension to give a clarified lysate having the plasmid DNA, and the precipitate having cellular debris and genomic DNA.

[0207] In some embodiments, the bubble mixer-chamber comprises a closed vertical column with a top, a bottom, a first, and a second side with a vent proximal to the top of the column. A first inlet port of the bubble mixer-chamber is on the first side proximal to the bottom of the column and in fluid communication with the holding coil. A second inlet port of the bubble mixer-chamber is proximal to the bottom on a second side opposite of the first inlet port and in fluid communication with a third tank, wherein the third tank is used for holding a precipitation or a neutralization solution. A third inlet port of the bubble mixer-chamber is proximal to the bottom of the column and about in the middle of the first and second inlets and is in fluid communication with a gas source the third inlet entering the bubble-mixer-chamber. A preferred embodiment utilizes a sintered sparger inside the closed vertical column of the third inlet port. The outlet port exiting the bubble mixing chamber is proximal to the top of the closed vertical column. The outlet port is in fluid communication with a fourth tank, wherein the mixed gas suspension containing the plasmid DNA is allowed to flow from the bubble-mixer-chamber into the fourth tank. The fourth tank is used for separating the precipitate of the mixed gas suspension having a plasmid containing fluid, and can also include an impeller mixer sufficient to provide uniform mixing of fluid without disturbing the precipitate. A fifth tank is used for a holding the clarified lysate or clarified plasmid containing fluid. The clarified lysate is then filtered at least once. A first filter has a particle size limit of about 5-10 μm and the second filter has a cut of about 0.2 μm. Although gravity, pressure, vacuum, or a mixture thereof can be used for transporting: suspension of cells; lysis solutions; precipitation solutions; neutralization solutions; or mixed gas suspensions from any of the tanks to mixers, holding coils or different tanks, pumps are utilized in a preferred embodiments. In a more preferred embodiment, at least one pump having a linear flow rate from about 0.1 to about 1 ft/second is used.

[0208] In another specific embodiment, a Y-connector having a having a first bifurcated branch, a second bifurcated branch and an exit branch is used to contact the cell suspension and the lysis solutions before they enter the high shear, low residence-time mixing device. The first tank holding the cell suspension is in fluid communication with the first bifurcated branch of the Y-connector through the first pump and the second tank holding the lysis solution is in fluid communication with the second bifurcated branch of the Y-connector through the second pump. The high shear, low residence-time mixing device is in fluid communication with an exit branch of the Y-connector, wherein the first and second pumps provide a linear flow rate of about 0.1 to about 2 ft/second for a contacted fluid exiting the Y-connector.

[0209] Another specific aspect of the present disclosure is a method of substantially separating plasmid DNA and genomic DNA from a bacterial cell lysate. The method comprises: delivering a cell lysate into a chamber; delivering a precipitation fluid or a neutralization fluid into the chamber; mixing the cell lysate and the precipitation fluid or a neutralization fluid in the chamber with gas bubbles forming a gas mixed suspension, wherein the gas mixed suspension comprises the plasmid DNA in a fluid portion (i.e. an unclarified lysate) and the genomic DNA is in a precipitate that is less dense than the fluid portion; floating the precipitate on top of the fluid portion; removing the fluid portion from the precipitate forming a clarified lysate, whereby the plasmid DNA in the clarified lysate is substantially separated from genomic DNA in the precipitate. In some embodiments, the chamber is the bubble mixing chamber as described above; the lysing solution comprises an alkali, an acid, a detergent, an organic solvent, an enzyme, a chaotrope, or a denaturant; the precipitation fluid or the neutralization fluid comprises potassium acetate, ammonium acetate, or a mixture thereof; and the gas bubbles comprise compressed air or an inert gas. Additionally, the decanted-fluid portion containing the plasmid DNA is preferably further purified with one or more purification steps selected from a group consisting of: ion exchange, hydrophobic interaction, size exclusion, reverse phase purification, endotoxin depletion, affinity purification, adsorption to silica, glass, or polymeric materials, expanded bed chromatography, mixed mode chromatography, displacement chromatography, hydroxyapatite purification, selective precipitation, aqueous two-phase purification, DNA condensation, thiophilic purification, ion-pair purification, metal chelate purification, filtration through nitrocellulose, or ultrafiltration.

[0210] In some embodiments, a method for isolating a plasmid DNA from cells comprising: mixing a suspension of cells having the plasmid DNA and genomic DNA with a lysis solution in a high-shear-low-residence-time-mixing-device for a first period of time forming a cell lysate fluid; incubating the cell lysate fluid for a second period of time in a holding coil forming a cell lysate suspension; delivering the cell lysate suspension into a chamber; delivering a precipitation/neutralization fluid into the chamber; mixing the cell lysate suspension and the a precipitation/neutralization fluid in the chamber with gas bubbles forming a gas mixed suspension, wherein the gas mixed suspension comprises an unclarified lysate containing the plasmid DNA and a precipitate containing the genomic DNA, wherein the precipitate is less dense than the unclarified lysate; floating the precipitate on top of the unclarified lysate; removing the precipitate from the unclarified lysate forming a clarified lysate, whereby the plasmid DNA is substantially separated from genomic DNA; precipitating the plasmid DNA from the clarified lysate forming a precipitated plasmid DNA; and resuspending the precipitated plasmid DNA in an aqueous solution.

[0211] The disclosure also relates to a method of producing a polypeptide of interest in a mammalian cell, the method comprising contacting the cell with a composition comprising one or a plurality of the RNA molecules disclosed herein. In some embodiments, the therapeutic and/or prophylactic agent is an mRNA, and wherein the mRNA encodes the polypeptide of interest, whereby the mRNA is capable of being translated in the cell to produce the polypeptide of interest (e.g., nanoparticle or trimer of the disclosure). Compositions comprising RNA nucleic acid sequences of the disclosure can be delivered via lipid-containing nanoparticles and/or modification of the RNA nucleic acid sequence encoding the one or more viral polypeptides.

[0212] In some embodiments, the composition includes at least one RNA polynucleotide having an open reading frame encoding at least one SARS-CoV-2 antigenic polypeptide having at least one modification, at least one 5′ terminal cap, and is formulated within a lipid nanoparticle.

[0213] In some embodiments, a 5′ terminal cap is 7mG(5′)ppp(5′)NlmpNp. In some embodiments, at least one chemical modification is selected from the group consisting of pseudouridine, N1-methylpseudouridine, N1-ethylpseudouridine, 2-thiouridine, 4′-thiouridine, 5-methylcytosine, 2-thio-1-methyl-1-deaza-pseudouridine, 2-thio-1-methyl-pseudouridine, 2-thio-5-aza-uridine, 2-thio-dihydropseudouridine, 2-thio-dihydrouridine, 2-thio-pseudouridine, 4-methoxy-2-thio-pseudouridine, 4-methoxy-pseudouridine, 4-thio-1-methyl-pseudouridine, 4-thio-pseudouridine, 5-aza-uridine, dihydropseudouridine, 5-methoxyuridine, and 2′-O-methyl uridine.

[0214] In some embodiments, a lipid nanoparticle comprises a cationic lipid, a PEG-modified lipid, a sterol, and a non-cationic lipid. In some embodiments, a cationic lipid is an ionizable cationic lipid and the non-cationic lipid is a neutral lipid, and the sterol is a cholesterol. In some embodiments, a cationic lipid is selected from the group consisting of 2,2-dilinoleyl-4-dimethylaminoethyl-[1,3]-dioxolane (DLin-KC2-DMA), dilinoleyl-methyl-4-dimethylaminobutyrate (DLin-MC3-DMA), di((Z)-non-2-en-1-yl) 9-((4-(dimethylamino) butanoyl)oxy)heptadecanedioate (L319), (12Z,15Z)-N,N-dimethyl-2-nonylhenicosa-12,15-dien-1-amine (L608), and N,N-dimethyl-1-[(1S,2R)-2-octylcyclopropyl]heptadecan-8-amine (L530).

[0215] In some embodiments, SARS-CoV-2 RNA (e.g., mRNA) vaccines are formulated in a lipid nanoparticle. In some embodiments, SARS-CoV-2 RNA (e.g., mRNA) vaccines are formulated in a lipid-polycation complex, referred to as a cationic lipid nanoparticle. The formation of the lipid nanoparticle may be accomplished by methods known in the art and/or as described in U.S. Publication No. 20120178702, herein incorporated by reference in its entirety. As a non-limiting example, the polycation may include a cationic peptide or a polypeptide such as, but not limited to, polylysine, polyornithine and/or polyarginine and the cationic peptides described in International Publication No. WO2012013326 or U.S. Publication No. US20130142818; each of which is herein incorporated by reference in its entirety. In some embodiments, SARS-CoV-2 RNA (e.g., mRNA) vaccines are formulated in a lipid nanoparticle that includes a non-cationic lipid such as, but not limited to, cholesterol or dioleoyl phosphatidylethanolamine (DOPE).

[0216] A lipid nanoparticle formulation may be influenced by, but not limited to, the selection of the cationic lipid component, the degree of cationic lipid saturation, the nature of the PEGylation, ratio of all components, and biophysical parameters such as size. In one example by Semple et al. (Nature Biotech. 2010 28:172-176; herein incorporated by reference in its entirety), the lipid nanoparticle formulation is composed of 57.1% cationic lipid, 7.1% dipalmitoylphosphatidylcholine, 34.3% cholesterol, and 1.4% PEG-c-DMA. As another example, changing the composition of the cationic lipid was shown to more effectively deliver siRNA to various antigen presenting cells (Basha et al. Mol Ther. 2011 19:2186-2200; herein incorporated by reference in its entirety).

[0217] In some embodiments, lipid nanoparticle formulations may comprise about 35% to about 45% cationic lipid, about 40% to about 50% cationic lipid, about 50% to about 60% cationic lipid and/or about 55% to about 65% cationic lipid. In some embodiments, the ratio of lipid to RNA (e.g., mRNA) in lipid nanoparticles may be about 5:1 to about 20:1, about 10:1 to about 25:1, about 15:1 to about 30:1, and/or at least about 30:1.

[0218] In some embodiments, the ratio of PEG in the lipid nanoparticle formulations may be increased or decreased and/or the carbon chain length of the PEG lipid may be modified from C14 to C18 to alter the pharmacokinetics and/or biodistribution of the lipid nanoparticle formulations. As a non-limiting example, lipid nanoparticle formulations may contain about 0.5% to about 3.0%, about 1.0% to about 3.5%, about 1.5% to about 4.0%, about 2.0% to about 4.5%, about 2.5% to about 5.0%, and/or about 3.0% to about 6.0% of the lipid molar ratio of PEG-c-DOMG (R-3-[(co-methoxy-poly(ethyleneglycol)2000) carb-amoyl)]-1,2-dimyristyloxypropyl-3-amine) (also referred to herein as PEG-DOMG) as compared to the cationic lipid, DSPC, and cholesterol. In some embodiments, the PEG-c-DOMG may be replaced with a PEG lipid such as, but not limited to, PEG-DSG (1,2-Distearoyl-sn-glycerol, methoxypolyethylene glycol), PEG-DMG (1,2-Dimyristoyl-sn-glycerol) and/or PEG-DPG (1,2-Dipalmitoyl-sn-glycerol, methoxypolyethylene glycol). The cationic lipid may be selected from any lipid known in the art such as, but not limited to, DLin-MC3-DMA, DLin-DMA, C12-200, and DLin-KC2-DMA.

[0219] In some embodiments, a SARS-CoV-2 RNA (e.g., mRNA) vaccine formulation is a nanoparticle that comprises at least one lipid. The lipid may be selected from, but is not limited to, DLin-DMA, DLin-K-DMA, 98N12-5, C12-200, DLin-MC3-DMA, DLin-KC2-DMA, DODMA, PLGA, PEG, PEG-DMG, (12Z,15Z)—N,N-dimethyl-2-nonylhenicosa-12,15-dien-1-amine (L608), N,N-dimethyl-1-[(1S,2R)-2-octylcyclopropyl]heptadecan-8-amine (L530), PEGylated lipids, and amino alcohol lipids.

[0220] In some embodiments, a lipid nanoparticle formulation includes about 25% to about 75% on a molar basis of a cationic lipid selected from the group consisting of 2,2-dilinoleyl-4-dimethylaminoethyl-[1,3]-dioxolane (DLin-KC2-DMA), dilinoleyl-methyl-4-dimethylaminobutyrate (DLin-MC3-DMA), and di((Z)-non-2-en-1-yl) 9-((4-(dimethylamino)butanoyl)oxy)heptadecanedioate (L319), e.g., about 35% to about 65%, about 45% to about 65%, about 60%, 57.5%, 50% or 40% on a molar basis.

[0221] In some embodiments, a lipid nanoparticle formulation includes about 0.5% to about 15% on a molar basis of the neutral lipid, e.g., about 3% to about 12%, about 5% to about 10% or about 15%, 10%, or 7.5% on a molar basis. Examples of neutral lipids include, without limitation, DSPC, POPC, DPPC, DOPE, and SM. In some embodiments, the formulation includes about 5% to about 50% on a molar basis of the sterol (e.g., about 15% to about 45%, about 20% to about 40%, about 40%, 38.5%, 35%, or 31% on a molar basis. A non-limiting example of a sterol is cholesterol. In some embodiments, a lipid nanoparticle formulation includes about 0.5% to about 20% on a molar basis of the PEG or PEG-modified lipid (e.g., about 0.5% to about 10%, about 0.5% to about 5%, about 1.5%, 0.5%, 1.5%, 3.5%, or 5% on a molar basis. In some embodiments, a PEG or PEG modified lipid comprises a PEG molecule of an average molecular weight of about 2,000 Da. In some embodiments, a PEG or PEG modified lipid comprises a PEG molecule of an average molecular weight of less than about 2,000, for example about 1,500 Da, about 1,000 Da, or about 500 Da. Non-limiting examples of PEG-modified lipids include PEG-distearoyl glycerol (PEG-DMG) (also referred herein as PEG-C14 or C14-PEG), and PEG-cDMA (further discussed in Reyes et al. J. Controlled Release, 107, 276-287 (2005) the content of which is herein incorporated by reference in its entirety).

[0222] In some embodiments, lipid nanoparticle formulations include about 25-75% of a cationic lipid selected from the group consisting of 2,2-dilinoleyl-4-dimethylaminoethyl-[1,3]-dioxolane (DLin-KC2-DMA), dilinoleyl-methyl-4-dimethylaminobutyrate (DLin-MC3-DMA), and di((Z)-non-2-en-1-yl) 9-((4-(dimethylamino)butanoyl)oxy)heptadecanedioate (L319), about 0.5-15% of the neutral lipid, about 5-50% of the sterol, and about 0.5-20% of the PEG or PEG-modified lipid on a molar basis.

[0223] In some embodiments, lipid nanoparticle formulations include about 35-65% of a cationic lipid selected from the group consisting of 2,2-dilinoleyl-4-dimethylaminoethyl-[1,3]-dioxolane (DLin-KC2-DMA), dilinoleyl-methyl-4-dimethylaminobutyrate (DLin-MC3-DMA), and di((Z)-non-2-en-1-yl) 9-((4-(dimethylamino)butanoyl)oxy)heptadecanedioate (L319), about 3-12% of the neutral lipid, about 15-45% of the sterol, and about 0.5-10% of the PEG or PEG-modified lipid on a molar basis.

[0224] In some embodiments, lipid nanoparticle formulations include about 45-65% of a cationic lipid selected from the group consisting of 2,2-dilinoleyl-4-dimethylaminoethyl-[1,3]-dioxolane (DLin-KC2-DMA), dilinoleyl-methyl-4-dimethylaminobutyrate (DLin-MC3-DMA), and di((Z)-non-2-en-1-yl) 9-((4-(dimethylamino)butanoyl)oxy)heptadecanedioate (L319), about 5-10% of the neutral lipid, about 25-40% of the sterol, and about 0.5-10% of the PEG or PEG-modified lipid on a molar basis.

[0225] In some embodiments, lipid nanoparticle formulations include about 60% of a cationic lipid selected from the group consisting of 2,2-dilinoleyl-4-dimethylaminoethyl-[1,3]-dioxolane (DLin-KC2-DMA), dilinoleyl-methyl-4-dimethylaminobutyrate (DLin-MC3-DMA), and di((Z)-non-2-en-1-yl) 9-((4-(dimethylamino)butanoyl)oxy)heptadecanedioate (L319), about 7.5% of the neutral lipid, about 31% of the sterol, and about 1.5% of the PEG or PEG-modified lipid on a molar basis.

[0226] Some embodiments of the present disclosure provide a SARS-CoV-2 vaccine that includes at least one ribonucleic acid (RNA) polynucleotide having an open reading frame encoding at least one SARS-CoV-2 antigenic polypeptide, wherein at least about 80% of the uracil in the open reading frame have a chemical modification, optionally wherein the SARS-CoV-2 vaccine is formulated in a lipid nanoparticle. In some embodiments, the RNA vaccine pharmaceutical compositions may be formulated in liposomes such as, but not limited to, DiLa2 liposomes (Marina Biotech, Bothell, Wash.), SMARTICLES® (Marina Biotech, Bothell, Wash.), neutral DOPC (1,2-dioleoyl-sn-glycero-3-phosphocholine) based liposomes (e.g., siRNA delivery for ovarian cancer (Landen et al. Cancer Biology & Therapy 2006 5(12)1708-1713); herein incorporated by reference in its entirety) and hyaluronan-coated liposomes (Quiet Therapeutics, Israel). In some embodiments, the RNA vaccines may be formulated in a lyophilized gel-phase liposomal composition as described in U.S. Publication No. US2012060293, herein incorporated by reference in its entirety.

[0227] The nanoparticle formulations may comprise a phosphate conjugate. The phosphate conjugate may increase in vivo circulation times and/or increase the targeted delivery of the nanoparticle. Phosphate conjugates for use with the present disclosure may be made by the methods described in International Publication No. WO2013033438 or U.S. Publication No. US20130196948, the content of each of which is herein incorporated by reference in its entirety. As a non-limiting example, the phosphate conjugates may include a compound of any one of the formulas described in International Publication No. WO2013033438, herein incorporated by reference in its entirety. In particular, the present disclosure relates to a pharmaceutical composition comprising nanoparticles which comprise RNA encoding at least one antigen, wherein: (i) the number of positive charges in the nanoparticles does not exceed the number of negative charges in the nanoparticles and/or (ii) the nanoparticles have a neutral or net negative charge and/or (iii) the charge ratio of positive charges to negative charges in the nanoparticles is about 1.4:1 or less and/or (iv) the zeta potential of the nanoparticles is about 0 or less.

[0228] In some embodiments, the nanoparticles described herein are colloidally stable for at least about 2 hours in the sense that no aggregation, precipitation or increase of size and polydispersity index by more than about 30% as measured by dynamic light scattering takes place. In some embodiments, the charge ratio of positive charges to negative charges in the nanoparticles is between about 1.4:1 and about 1:8, preferably between about 1.2:1 and about 1:4, e.g. between about 1:1 and about 1:3 such as between about 1:1.2 and about 1:2, about 1:1.2 and about 1:1.8, about 1:1.3 and about 1:1.7, in particular between about 1:1.4 and about 1:1.6, such as about 1:1.5. In some embodiments, the zeta potential of the nanoparticles is about −5 or less, about −10 or less, about −15 or less, about −20 or less or about −25 or less. In various embodiments, the zeta potential of the nanoparticles is about −35 or higher, about −30 or higher or about −25 or higher. In some embodiments, the nanoparticles have a zeta potential from about 0 mV to about −50 mV, preferably about 0 mV to about −40 mV or about −10 mV to about −30 mV.

[0229] In some embodiments pharamceutical compositions of the disclosure comprise a nanoparticle or a liposome that encapsulates a DNA, RNA or DNA/RNA hydbrid comprising at least one expressible nucleic acid sequence. Liposomes are microscopic lipidic vesicles often having one or more bilayers of a vesicle-forming lipid, such as a phospholipid, and are capable of encapsulating a drug. Different types of liposomes may be employed in the context of the present disclosure, including, without being limited thereto, multilamellar vesicles (MLV), small unilamellar vesicles (SUV), large unilamellar vesicles (LUV), sterically stabilized liposomes (SSL), multivesicular vesicles (MV), and large multivesicular vesicles (LMV) as well as other bilayered forms known in the art. The size and lamellarity of the liposome will depend on the manner of preparation and the selection of the type of vesicles to be used will depend on the preferred mode of administration. There are several other forms of supramolecular organization in which lipids may be present in an aqueous medium, comprising lamellar phases, hexagonal and inverse hexagonal phases, cubic phases, micelles, reverse micelles composed of monolayers. These phases may also be obtained in the combination with DNA or RNA, and the interaction with RNA and DNA may substantially affect the phase state. The described phases may be present in the nanoparticulate RNA formulations of the present disclosure.

[0230] For formation of RNA lipoplexes from RNA and liposomes, any suitable method of forming liposomes can be used so long as it provides the envisaged RNA lipoplexes. Liposomes may be formed using standard methods such as the reverse evaporation method (REV), the ethanol injection method, the dehydration-rehydration method (DRV), sonication or other suitable methods.

[0231] After liposome formation, the liposomes can be sized to obtain a population of liposomes having a substantially homogeneous size range.

[0232] Bilayer-forming lipids have typically two hydrocarbon chains, particularly acyl chains, and a head group, either polar or nonpolar. Bilayer-forming lipids are either composed of naturally-occurring lipids or of synthetic origin, including the phospholipids, such as phosphatidylcholine, phosphatidylethanolamine, phosphatide acid, phosphatidylinositol, and sphingomyelin, where the two hydrocarbon chains are typically between about 14-22 carbon atoms in length, and have varying degrees of unsaturation. Other suitable lipids for use in the composition of the present disclosure include glycolipids and sterols such as cholesterol and its various analogs which can also be used in the liposomes.

[0233] Cationic lipids typically have a lipophilic moiety, such as a sterol, an acyl or diacyl chain, and have an overall net positive charge. The head group of the lipid typically carries the positive charge. The cationic lipid preferably has a positive charge of about 1 to about 10 valences, more preferably a positive charge of about 1 to about 3 valences, and more preferably a positive charge of about 1 valence. Examples of cationic lipids include, but are not limited to 1,2-di-O-octadecenyl-3-trimethylammonium propane (DOTMA); dimethyl-dioctadecylammonium (DDAB); 1,2-dioleoyl-3-trimethylammonium-propane (DOTAP); 1,2-dioleoyl-3-dimethylammonium-propane (DODAP); 1,2-diacyloxy-3-dimethylammonium propanes; 1,2-dialkyloxy-3-dimethylammonium propanes; dioctadecyldimethyl ammonium chloride (DODAC), 1,2-dimyristoyloxypropyl-1,3-dimethylhydroxyethyl ammonium (DMRIE), and 2,3-dioleoyloxy-N-[2(spermine carboxamide)ethyl]-N,N-dimethyl-1-propanamium trifluoroacetate (DOSPA). Preferred are DOTMA, DOTAP, DODAC, and DOSPA. Most preferred is DOTMA.

[0234] In addition, the nanoparticles described herein preferably further include a neutral lipid in view of structural stability and the like. The neutral lipid can be appropriately selected in view of the delivery efficiency of the RNA-lipid complex. Examples of neutral lipids include, but are not limited to, 1,2-di-(9Z-octadecenoyl)-sn-glycero-3-phosphoethanolamine (DOPE), 1,2-dioleoyl-sn-glycero-3-phosphocholine (DOPC), diacylphosphatidyl choline, diacylphosphatidyl ethanol amine, ceramide, sphingoemyelin, cephalin, sterol, and cerebroside. Preferred is DOPE and/or DOPC. Most preferred is DOPE. In the case where a cationic liposome includes both a cationic lipid and a neutral lipid, the molar ratio of the cationic lipid to the neutral lipid can be appropriately determined in view of stability of the liposome and the like.

[0235] According to one embodiment, the nanoparticles described herein may comprise phospholipids. The phospholipids may be a glycerophospholipid. Examples of glycerophospholipid include, without being limited thereto, three types of lipids: (i) zwitterionic phospholipids, which include, for example, phosphatidylcholine (PC), egg yolk phosphatidylcholine, soybean-derived PC in natural, partially hydrogenated or fully hydrogenated form, dimyristoyl phosphatidylcholine (DMPC) sphingomyelin (SM); (ii) negatively charged phospholipids: which include, for example, phosphatidylserine (PS), phosphatidylinositol (PI), phosphatidic acid (PA), phosphatidylglycerol (PG) dipalmipoyl PG, dimyristoyl phosphatidylglycerol (DMPG); synthetic derivatives in which the conjugate renders a zwitterionic phospholipid negatively charged such is the case of methoxypolyethylene, glycol-distearoyl phosphatidylethanolamine (mPEG-DSPE); and (iii) cationic phospholipids, which include, for example, phosphatidylcholine or sphingomyelin of which the phosphomonoester was O-methylated to form the cationic lipids.

[0236] Association of RNA to the lipid carrier can occur, for example, by the RNA filling interstitial spaces of the carrier, such that the carrier physically entraps the RNA, or by covalent, ionic, or hydrogen bonding, or by means of adsorption by non-specific bonds. Whatever the mode of association, the RNA must retain its therapeutic, i.e. antigen-encoding, properties.

[0237] In some embodiments, the nanoparticles comprise at least one lipid. In some embodiments, the nanoparticles comprise at least one cationic lipid. The cationic lipid can be monocationic or polycationic. Any cationic amphiphilic molecule, eg, a molecule which comprises at least one hydrophilic and lipophilic moiety is a cationic lipid within the meaning of the present disclosure. In some embodiments, the positive charges are contributed by the at least one cationic lipid and the negative charges are contributed by the RNA. In some embodiments, the nanoparticles comprises at least one helper lipid. The helper lipid may be a neutral or an anionic lipid. The helper lipid may be a natural lipid, such as a phospholipid or an analogue of a natural lipid, or a fully synthetic lipid, or lipid-like molecule, with no similarities with natural lipids. In some embodiments, the cationic lipid and/or the helper lipid is a bilayer forming lipid.

[0238] In some embodiments, the at least one cationic lipid comprises 1,2-di-O-octadecenyl-3-trimethylammonium propane (DOTMA) or analogs or derivatives thereof and/or 1,2-dioleoyl-3-trimethylammonium-propane (DOTAP) or analogs or derivatives thereof. In some embodiments, the at least one helper lipid comprises 1,2-di-(9Z-octadecenoyl)-sn-glycero-3-phosphoethanolamine (DOPE) or analogs or derivatives thereof, cholesterol (Chol) or analogs or derivatives thereof and/or 1,2-dioleoyl-sn-glycero-3-phosphocholine (DOPC) or analogs or derivatives thereof. In some embodiments, the molar ratio of the at least one cationic lipid to the at least one helper lipid is from about 10:0 to about 3:7, preferably about 9:1 to about 3:7, about 4:1 to about 1:2, about 4:1 to about 2:3, about 7:3 to about 1:1, or about 2:1 to about 1:1, preferably about 1:1. In some embodiments, in this ratio, the molar amount of the cationic lipid results from the molar amount of the cationic lipid multiplied by the number of positive charges in the cationic lipid. In various embodiments, the lipids are not functionalized such as functionalized by mannose, histidine and/or imidazole, the nanoparticles do not comprise a targeting ligand such as mannose functionalized lipids and/or the nanoparticles do not comprise one or more of the following: pH dependent compounds, cationic polymers such as polymers containing histidine and/or polylysine, wherein the polymers may optionally be PEGylated and/or histidylated, or divalent ions such as Ca 2+.

[0239] In various embodiments, the RNA nanoparticles may comprise peptides, preferentially with a molecular weight of up to about 2500 Da.

[0240] In the nanoparticles described herein the lipid may form a complex with and/or may encapsulate the RNA. In some embodiments, the nanoparticles comprise a lipoplex or liposome. In some embodiments, the lipid is comprised in a vesicle encapsulating said RNA. The vesicle may be a multilamellar vesicle, an unilamellar vesicle, or a mixture thereof. The vesicle may be a liposome. In some embodiments, the nanoparticles are lipoplexes comprising DOTMA and DOPE in a molar ratio of about 10:0 to about 1:9, preferably about 8:2 to about 3:7, and more preferably of about 7:3 to about 5:5 and wherein the charge ratio of positive charges in DOTMA to negative charges in the RNA is about 1.8:2 to about 0.8:2, more preferably about 1.6:2 to about 1:2, even more preferably about 1.4:2 to about 1.1:2 and even more preferably about 1.2:2.

[0241] In some embodiments, the nanoparticles are lipoplexes comprising DOTMA and Cholesterol in a molar ratio of about 10:0 to about 1:9, preferably about 8:2 to about 3:7, and more preferably of about 7:3 to about 5:5 and wherein the charge ratio of positive charges in DOTMA to negative charges in the RNA is about 1.8:2 to about 0.8:2, more preferably about 1.6:2 to about 1:2, even more preferably about 1.4:2 to about 1.1:2 and even more preferably about 1.2:2. In some embodiments, the nanoparticles are lipoplexes comprising DOTAP and DOPE in a molar ratio of about 10:0 to about 1:9, preferably about 8:2 to about 3:7, and more preferably of about 7:3 to about 5:5 and wherein the charge ratio of positive charges in DOTMA to negative charges in the RNA is about 1.8:2 to about 0.8:2, more preferably about 1.6:2 to about 1:2, even more preferably about 1.4:2 to about 1.1:2 and even more preferably about 1.2:2. In some embodiments, the nanoparticles are lipoplexes comprising DOTMA and DOPE in a molar ratio of about 2:1 to about 1:2, preferably about 2:1 to about 1:1, and wherein the charge ratio of positive charges in DOTMA to negative charges in the RNA is about 1.4:1 or less. In some embodiments, the nanoparticles are lipoplexes comprising DOTMA and cholesterol in a molar ratio of about 2:1 to about 1:2, preferably about 2:1 to about 1:1, and wherein the charge ratio of positive charges in DOTMA to negative charges in the RNA is about 1.4:1 or less. In some embodiments, the nanoparticles are lipoplexes comprising DOTAP and DOPE in a molar ratio of about 2:1 to about 1:2, preferably about 2:1 to about 1:1, and wherein the charge ratio of positive charges in DOTAP to negative charges in the RNA is about 1.4:1 or less. In some embodiments, the nanoparticles have an avarage diameter in the range of from about 50 nm to about 1000 nm, preferably from about 50 nm to about 400 nm, preferably about 100 nm to about 300 nm such as about 150 nm to about 200 nm. In some embodiments, the nanoparticles have a diameter in the range of about 200 to about 700 nm, about 200 to about 600 nm, preferably about 250 to about 550 nm, in particular about 300 to about 500 nm or about 200 to about 400 nm.

[0242] In some embodiments, the polydispersity index of the nanoparticles described herein as measured by dynamic light scattering is about 0.5 or less, preferably about 0.4 or less or even more preferably about 0.3 or less. In some embodiments, the nanoparticles described herein are obtainable by one or more of the following: (i) incubation of liposomes in an aqueous phase with the RNA in an aqueous phase, (ii) incubation of the lipid dissolved in an organic, water miscible solvent, such as ethanol, with the RNA in aqueous solution, (iii) reverse phase evaporation technique, (iv) freezing and thawing of the product, (v) dehydration and rehydration of the product, (vi) lyophilization and rehydration of the of the product, or (vii) spray drying and rehydration of the product.

[0243] The nanoparticle formulation may comprise a polymer conjugate. The polymer conjugate may be a water-soluble conjugate. The polymer conjugate may have a structure as described in U.S. Publication No. 20130059360, the content of which is herein incorporated by reference in its entirety. In some aspects, polymer conjugates with the polynucleotides of the present disclosure may be made using the methods and/or segmented polymeric reagents described in U.S. Publication No. 20130072709, herein incorporated by reference in its entirety. In other aspects, the polymer conjugate may have pendant side groups comprising ring moieties such as, but not limited to, the polymer conjugates described in U.S. Publication No. US20130196948, the contents of which is herein incorporated by reference in its entirety.

[0244] The nanoparticle formulations may comprise a conjugate to enhance the delivery of nanoparticles of the present disclosure in a subject. Further, the conjugate may inhibit phagocytic clearance of the nanoparticles in a subject. In some aspects, the conjugate may be a “self” peptide designed from the human membrane protein CD47 (e.g., the “self” particles described by Rodriguez et al. (Science 2013, 339, 971-975), herein incorporated by reference in its entirety). As shown by Rodriguez et al., the self peptides delayed macrophage-mediated clearance of nanoparticles which enhanced delivery of the nanoparticles. In other aspects, the conjugate may be the membrane protein CD47 (e.g., see Rodriguez et al. Science 2013, 339, 971-975, herein incorporated by reference in its entirety). Rodriguez et al. showed that, similarly to “self” peptides, CD47 can increase the circulating particle ratio in a subject as compared to scrambled peptides and PEG coated nanoparticles.

[0245] In some embodiments, about 100% of the uracil in the open reading frame have a chemical modification. In some embodiments, a chemical modification is in the 5-position of the uracil. In some embodiments, a chemical modification is a N₁-methyl pseudouridine. In some embodiments, about 100% of the uracil in the open reading frame have a N₁-methyl pseudouridine in the 5-position of the uracil.

[0246] In some embodiments, efficacy of RNA vaccines RNA (e.g., mRNA) can be significantly enhanced when combined with a flagellin adjuvant, in particular, when one or more antigen-encoding mRNAs is combined with an mRNA encoding flagellin.

[0247] RNA (e.g., mRNA) vaccines combined with the flagellin adjuvant (e.g., mRNA-encoded flagellin adjuvant) have superior properties in that they may produce much larger antibody titers and produce responses earlier than commercially available vaccine formulations. While not wishing to be bound by theory, it is believed that the RNA vaccines, for example, as mRNA polynucleotides, are better designed to produce the appropriate protein conformation upon translation, for both the antigen and the adjuvant, as the RNA (e.g., mRNA) vaccines co-opt natural cellular machinery. Unlike traditional vaccines, which are manufactured ex vivo and may trigger unwanted cellular responses, RNA (e.g., mRNA) vaccines are presented to the cellular system in a more native fashion.

[0248] Some embodiments of the present disclosure provide RNA (e.g., mRNA) vaccines that include at least one RNA (e.g., mRNA) polynucleotide having an open reading frame encoding at least one antigenic polypeptide or an immunogenic fragment thereof (e.g., an immunogenic fragment capable of inducing an immune response to the antigenic polypeptide) and at least one RNA (e.g., mRNA polynucleotide) having an open reading frame encoding a flagellin adjuvant.

[0249] In some embodiments, at least one flagellin polypeptide (e.g., encoded flagellin polypeptide) is a flagellin protein. In some embodiments, at least one flagellin polypeptide (e.g., encoded flagellin polypeptide) is an immunogenic flagellin fragment. In some embodiments, at least one flagellin polypeptide and at least one antigenic polypeptide are encoded by a single RNA (e.g., mRNA) polynucleotide. In other embodiments, at least one flagellin polypeptide and at least one antigenic polypeptide are each encoded by a different RNA polynucleotide.

[0250] Some embodiments of the present disclosure provide methods of inducing an antigen specific immune response in a subject, comprising administering to the subject a SARS-CoV-2 vaccine in an amount effective to produce an antigen specific immune response.

[0251] In some aspects, vaccines of the disclosure (e.g., LNP-encapsulated mRNA vaccines) produce prophylactically- and/or therapeutically-efficacious levels, concentrations and/or titers of antigen-specific antibodies in the blood or serum of a vaccinated subject. As defined herein, the term antibody titer refers to the amount of antigen-specific antibody produces in s subject, e.g., a human subject. In exemplary embodiments, antibody titer is expressed as the inverse of the greatest dilution (in a serial dilution) that still gives a positive result. In exemplary embodiments, antibody titer is determined or measured by enzyme-linked immunosorbent assay (ELISA). In exemplary embodiments, antibody titer is determined or measured by neutralization assay, e.g., by microneutralization assay. In certain aspects, antibody titer measurement is expressed as a ratio, such as about 1:40, 1:100, etc.

[0252] In exemplary embodiments of the disclosure, an efficacious vaccine produces an antibody titer of greater than about 1:40, greater that about 1:100, greater than about 1:400, greater than about 1:1000, greater than about 1:2000, greater than about 1:3000, greater than about 1:4000, greater than about 1:500, greater than about 1:6000, greater than about 1:7500, greater than about 1:10000. In exemplary embodiments, the antibody titer is produced or reached by about 10 days following vaccination, by about 20 days following vaccination, by about 30 days following vaccination, by about 40 days following vaccination, or by about 50 or more days following vaccination. In exemplary embodiments, the titer is produced or reached following a single dose of vaccine administered to the subject. In other embodiments, the titer is produced or reached following multiple doses, e.g., following a first and a second dose (e.g., a booster dose.)

[0253] In exemplary aspects of the disclosure, antigen-specific antibodies are measured in units of g/ml or are measured in units of IU/L (International Units per liter) or mIU/ml (milli International Units per ml). In exemplary embodiments of the disclosure, an efficacious vaccine produces more than about 0.5 μg/ml, 0.1 μg/ml, 0.2 μg/ml, 0.35 μg/ml, 0.5 μg/ml, 1 μg/ml, 2 μg/ml, 5 μg/ml or 10 μg/ml of antigen-specific antibodies. In exemplary embodiments of the disclosure, an efficacious vaccine produces more than about 10 mIU/ml, 20 mIU/ml, 50 mIU/ml, 100 mIU/ml, 200 mIU/ml, 500 mIU/ml or 1000 mIU/ml of antigen-specific antibodies. In exemplary embodiments, the antibody level or concentration is produced or reached by about 10 days following vaccination, by about 20 days following vaccination, by about 30 days following vaccination, by about 40 days following vaccination, or by about 50 or more days following vaccination. In exemplary embodiments, the level or concentration is produced or reached following a single dose of vaccine administered to the subject. In other embodiments, the level or concentration is produced or reached following multiple doses, e.g., following a first and a second dose (e.g., a booster dose). In exemplary embodiments, antibody level or concentration is determined or measured by enzyme-linked immunosorbent assay (ELISA). In exemplary embodiments, antibody level or concentration is determined or measured by neutralization assay, e.g., by microneutralization assay.

[0254] In some embodiments, the SARS-CoV-2 vaccine includes at least one RNA polynucleotide having an open reading frame encoding at least one SARS-CoV-2 antigenic polypeptide having at least one modification, at least one 5′ terminal cap, and is formulated within a lipid nanoparticle. 5′-capping of polynucleotides may be completed concomitantly during the in vitro-transcription reaction using the following chemical RNA cap analogs to generate the 5′-guanosine cap structure according to manufacturer protocols: 3′-O-Me-m7G(5′)ppp(5′) G [the ARCA cap]; G(5′)ppp(5′)A; G(5′)ppp(5′)G; m7G(5′)ppp(5′)A; m7G(5′)ppp(5′)G (New England BioLabs, Ipswich, Mass.). 5′-capping of modified RNA may be completed post-transcriptionally using a Vaccinia Virus Capping Enzyme to generate the “Cap 0” structure: m7G(5′)ppp(5′)G (New England BioLabs, Ipswich, Mass.). Cap 1 structure may be generated using both Vaccinia Virus Capping Enzyme and a 2′-O methyl-transferase to generate m7G(5′)ppp(5′)G-2′-O-methyl. Cap 2 structure may be generated from the Cap 1 structure followed by the 2′-O-methylation of the 5′-antepenultimate nucleotide using a 2′-O methyl-transferase. Cap 3 structure may be generated from the Cap 2 structure followed by the 2′-O-methylation of the 5′-preantepenultimate nucleotide using a 2′-O methyl-transferase. Enzymes are preferably derived from a recombinant source.

[0255] When transfected into mammalian cells, the modified mRNAs have a stability of from about 12 to about 18 hours or more than about 18 hours, e.g., about 24, 36, 48, 60, 72, or greater than about 72 hours.

[0256] In some embodiments, a codon optimized RNA may, for instance, be one in which the levels of G/C are enhanced. The G/C-content of nucleic acid molecules may influence the stability of the RNA. RNA having an increased amount of guanine (G) and/or cytosine (C) residues may be functionally more stable than nucleic acids containing a large amount of adenine (A) and thymine (T) or uracil (U) nucleotides. WO02/098443 discloses a pharmaceutical composition containing an mRNA stabilized by sequence modifications in the translated region. Due to the degeneracy of the genetic code, the modifications work by substituting existing codons for those that promote greater RNA stability without changing the resulting amino acid. The approach is limited to coding regions of the RNA.

[0257] In some embodiments, polynucleotides (e.g., RNA polynucleotides, such as mRNA polynucleotides) include a combination of at least two (e.g., 2, 3, 4 or more) of the aforementioned modified nucleobases.

[0258] In some embodiments, modified nucleobases in polynucleotides (e.g., RNA polynucleotides, such as mRNA polynucleotides) are selected from the group consisting of pseudouridine (ψ), 2-thiouridine (s2U), 4′-thiouridine, 5-methylcytosine, 2-thio-1-methyl-1-deaza-pseudouridine, 2-thio-1-methyl-pseudouridine, 2-thio-5-aza-uridine, 2-thio-dihydropseudouridine, 2-thio-dihydrouridine, 2-thio-pseudouridine, 4-methoxy-2-thio-pseudouridine, 4-methoxy-pseudouridine, 4-thio-1-methyl-pseudouridine, 4-thio-pseudouridine, 5-aza-uridine, dihydropseudouridine, 5-methyluridine, 5-methoxyuridine, 2′-O-methyl uridine, 1-methyl-pseudouridine (m1ψ), 1-ethyl-pseudouridine (e1ψ), 5-methoxyuridine (mo5U), 5-methyl-cytidine (m5C), α-thio-guanosine, α-thio-adenosine, 5-cyano uridine, 4′-thio uridine 7-deaza-adenine, 1-methyl-adenosine (m1A), 2-methyl-adenine (m2A), N6-methyl-adenosine (m6A), and 2,6-Diaminopurine, (I), 1-methyl-inosine (m1I), wyosine (imG), methylwyosine (mimG), 7-deaza-guanosine, 7-cyano-7-deaza-guanosine (preQ0), 7-aminomethyl-7-deaza-guanosine (preQ1), 7-methyl-guanosine (m7G), 1-methyl-guanosine (m1G), 8-oxo-guanosine, 7-methyl-8-oxo-guanosine, 2,8-dimethyladenosine, 2-geranylthiouridine, 2-lysidine, 2-selenouridine, 3-(3-amino-3-carboxypropyl)-5,6-dihydrouridine, 3-(3-amino-3-carboxypropyl)pseudouridine, 3-methylpseudouridine, 5-(carboxyhydroxymethyl)-2′-O-methyluridine methyl ester, 5-aminomethyl-2-geranylthiouridine, 5-aminomethyl-2-selenouridine, 5-aminomethyluridine, 5-carbamoylhydroxymethyluridine, 5-carbamoylmethyl-2-thiouridine, 5-carboxymethyl-2-thiouridine, 5-carboxymethyl aminomethyl-2-geranylthiouridine, 5-carboxymethylaminomethyl-2-selenouridine, 5-cyanomethyluridine, 5-hydroxycytidine, 5-methylaminomethyl-2-geranylthiouridine, 7-aminocarboxypropyl-demethylwyosine, 7-aminocarboxypropylwyosine, 7-aminocarboxypropylwyosine methyl ester, 8-methyladenosine, N4,N4-dimethylcytidine, N6-formyladenosine, N6-hydroxymethyladenosine, agmatidine, cyclic N6-threonylcarbamoyladenosine, glutamyl-queuosine, methylated undermodified hydroxywybutosine, N4,N4,2′-O-trimethylcytidine, geranylated 5-methylaminomethyl-2-thiouridine, geranylated 5-carboxymethylaminomethyl-2-thiouridine, Qbase, preQ0base, preQ1base, and combinations of two or more thereof. In some embodiments, the at least one chemically modified nucleoside is selected from the group consisting of pseudouridine, 1-methyl-pseudouridine, 1-ethyl-pseudouridine, 5-methylcytosine, 5-methoxyuridine, and a combination thereof. In some embodiments, the polyribonucleotide (e.g., RNA polyribonucleotide, such as mRNA polyribonucleotide) includes a combination of at least two (e.g., 2, 3, 4 or more) of the aforementioned modified nucleobases. In some embodiments, polynucleotides (e.g., RNA polynucleotides, such as mRNA polynucleotides) include a combination of at least two (e.g., 2, 3, 4 or more) of the aforementioned modified nucleobases.

[0259] The expressible nucleic acid sequence of the present disclosure may be partially or fully modified along the entire length of the molecule. For example, one or more or all or a given type of nucleotide (e.g., purine or pyrimidine, or any one or more or all of A, G, U, C) may be uniformly modified in a polynucleotide of the disclosure, or in a given predetermined sequence region thereof (e.g., in the mRNA including or excluding the polyA tail). In some embodiments, all nucleotides X in a polynucleotide of the present disclosure (or in a given sequence region thereof) are modified nucleotides, wherein X may be any one of nucleotides A, G, U, C, or any one of the combinations A+G, A+U, A+C, G+U, G+C, U+C, A+G+U, A+G+C, G+U+C, or A+G+C.

[0260] The polynucleotide may contain from about 1% to about 100% modified nucleotides (either in relation to overall nucleotide content, or in relation to one or more types of nucleotide, i.e., any one or more of A, G, U or C) or any intervening percentage (e.g., from about 1% to about 20%, from about 1% to about 25%, from about 1% to about 50%, from about 1% to about 60%, from about 1% to about 70%, from about 1% to about 80%, from about 1% to about 90%, from about 1% to about 95%, from about 10% to about 20%, from about 10% to about 25%, from about 10% to about 50%, from about 10% to about 60%, from about 10% to about 70%, from about 10% to about 80%, from about 10% to about 90%, from about 10% to about 95%, from about 10% to about 100%, from about 20% to about 25%, from about 20% to about 50%, from about 20% to about 60%, from about 20% to about 70%, from about 20% to about 80%, from about 20% to about 90%, from about 20% to about 95%, from about 20% to about 100%, from about 50% to about 60%, from about 50% to about 70%, from about 50% to about 80%, from about 50% to about 90%, from about 50% to about 95%, from about 50% to about 100%, from about 70% to about 80%, from about 70% to about 90%, from about 70% to about 95%, from about 70% to about 100%, from about 80% to about 90%, from about 80% to about 95%, from about 80% to about 100%, from about 90% to about 95%, from about 90% to about 100%, and from about 95% to about 100%). It will be understood that any remaining percentage is accounted for by the presence of unmodified A, G, U, or C.

[0261] The nucleic acid sequences may contain at a minimum about 1% and at maximum about 100% modified nucleotides, or any intervening percentage, such as at least about 5% modified nucleotides, at least about 10% modified nucleotides, at least about 25% modified nucleotides, at least about 50% modified nucleotides, at least about 80% modified nucleotides, or at least about 90% modified nucleotides. For example, the polynucleotides may contain a modified pyrimidine such as a modified uracil or cytosine. In some embodiments, at least about 5%, at least about 10%, at least about 25%, at least about 50%, at least about 80%, at least about 90% or about 100% of the uracil in the polynucleotide is replaced with a modified uracil (e.g., a 5-substituted uracil). The modified uracil can be replaced by a compound having a single unique structure, or can be replaced by a plurality of compounds having different structures (e.g., about 2, 3, 4, or more unique structures). In some embodiments, at least about 5%, at least about 10%, at least about 25%, at least about 50%, at least about 80%, at least about 90%, or about 100% of the cytosine in the polynucleotide is replaced with a modified cytosine (e.g., a 5-substituted cytosine). The modified cytosine can be replaced by a compound having a single unique structure, or can be replaced by a plurality of compounds having different structures (e.g., about 2, 3, 4, or more unique structures).

[0262] Thus, in some embodiments, the RNA vaccines and/or RNA nucleic acid seqeunces comprise a 5′UTR element, an optionally codon optimized open reading frame, and a 3′UTR element, a poly(A) sequence and/or a polyadenylation signal wherein the RNA is not chemically modified.

[0263] Viral vaccines of the present disclosure comprise at least one RNA polynucleotide, such as a mRNA (e.g., modified mRNA). mRNA, for example, is transcribed in vitro from template DNA, referred to as an “in vitro transcription template.” In some embodiments, the at least one RNA polynucleotide has at least one chemical modification. The at least one chemical modification may include, but is expressly not limited to, any modification described herein.

[0264] In vitro transcription of RNA is known in the art and is described in WO/2014/152027, which is incorporated by reference herein in its entirety. For example, in some embodiments, the RNA transcript is generated using a non-amplified, linearized DNA template in an in vitro transcription reaction to generate the RNA transcript. In some embodiments, the RNA transcript is capped via enzymatic capping. In some embodiments, the RNA transcript is purified via chromatographic methods, e.g., use of an oligo dT substrate. Some embodiments exclude the use of DNase. In some embodiments, the RNA transcript is synthesized from a non-amplified, linear DNA template coding for the gene of interest via an enzymatic in vitro transcription reaction utilizing a T7 phage RNA polymerase and nucleotide triphosphates of the desired chemistry. Any number of RNA polymerases or variants may be used in the method of the present disclosure. The polymerase may be selected from, but is not limited to, a phage RNA polymerase, e.g., a T7 RNA polymerase, a T3 RNA polymerase, a SP6 RNa polymerase, and/or mutant polymerases such as, but not limited to, polymerases able to incorporate modified nucleic acids and/or modified nucleotides, including chemically modified nucleic acids and/or nucleotides.

[0265] In some embodiments, a non-amplified, linearized plasmid DNA is utilized as the template DNA for in vitro transcription. In some embodiments, the template DNA is isolated DNA. In some embodiments, the template DNA is cDNA. In some embodiments, the cDNA is formed by reverse transcription of a RNA polynucleotide, for example, but not limited to SARS-CoV-2 RNA, e.g. SARS-CoV-2 mRNA. In some embodiments, cells, e.g., bacterial cells, e.g., E. coli, e.g., DH-1 cells are transfected with the plasmid DNA template. In some embodiments, the transfected cells are cultured to replicate the plasmid DNA which is then isolated and purified. In some embodiments, the DNA template includes a RNA polymerase promoter, e.g., a T7 promoter located 5′ to and operably linked to the gene of interest.

### F. Vaccines

[0266] Disclosed are DNA vaccines comprising at least about 70%, 75%, 80%, 85%, 86%, 87%, 88%, 89%, 90%, 91%, 92%, 93%, 94%, 95%, 96%, 97%, 98%, 99% or 100% sequence identity to SEQ ID NO: 68, SEQ ID NO: 71, SEQ ID NO: 74, SEQ ID NO: 77, SEQ ID NO: 80, SEQ ID NO: 83, SEQ ID NO: 86, SEQ ID NO: 89, SEQ ID NO: 92, SEQ ID NO: 95, SEQ ID NO: 98, SEQ ID NO: 101, SEQ ID NO: 104, SEQ ID NO: 107, SEQ ID NO: 110, SEQ ID NO: 113, SEQ ID NO: 116, SEQ ID NO: 119, SEQ ID NO: 122, SEQ ID NO: 125, SEQ ID NO: 128, SEQ ID NO: 131, SEQ ID NO: 134, SEQ ID NO: 137, SEQ ID NO: 140, SEQ ID NO: 143, SEQ ID NO: 146, SEQ ID NO: 149, SEQ ID NO: 152, SEQ ID NO: 155 or SEQ ID NO: 158, or a functional fragment or variant thereof. Also disclosed are RNA vaccines comprising at least about 70%, 75%, 80%, 85%, 86%, 87%, 88%, 89%, 90%, 91%, 92%, 93%, 94%, 95%, 96%, 97%, 98%, 99% or 100% sequence identity to SEQ ID NO: 69, SEQ ID NO: 72, SEQ ID NO: 75, SEQ ID NO: 78, SEQ ID NO: 81, SEQ ID NO: 84, SEQ ID NO: 87, SEQ ID NO: 90, SEQ ID NO: 93, SEQ ID NO: 96, SEQ ID NO: 99, SEQ ID NO: 102, SEQ ID NO: 105, SEQ ID NO: 108, SEQ ID NO: 111, SEQ ID NO: 114, SEQ ID NO: 117, SEQ ID NO: 120, SEQ ID NO: 123, SEQ ID NO: 126, SEQ ID NO: 129, SEQ ID NO: 132, SEQ ID NO: 135, SEQ ID NO: 138, SEQ ID NO: 141, SEQ ID NO: 144, SEQ ID NO: 147, SEQ ID NO: 150, SEQ ID NO: 153, SEQ ID NO: 156 or SEQ ID NO: 159, or a functional fragment or variant thereof. In some embodiment, the DNA or RNA vaccine disclosed herein encodes a polypeptide comprising at least about 70%, 75%, 80%, 85%, 86%, 87%, 88%, 89%, 90%, 91%, 92%, 93%, 94%, 95%, 96%, 97%, 98%, 99% or 100% sequence identity to SEQ ID NO: 70, SEQ ID NO: 73, SEQ ID NO: 76, SEQ ID NO: 79, SEQ ID NO: 82, SEQ ID NO: 85, SEQ ID NO: 88, SEQ ID NO: 91, SEQ ID NO: 94, SEQ ID NO: 97, SEQ ID NO: 100, SEQ ID NO: 103, SEQ ID NO: 106, SEQ ID NO: 109, SEQ ID NO: 112, SEQ ID NO: 115, SEQ ID NO: 118, SEQ ID NO: 121, SEQ ID NO: 124, SEQ ID NO: 127, SEQ ID NO: 130, SEQ ID NO: 133, SEQ ID NO: 136, SEQ ID NO: 139, SEQ ID NO: 142, SEQ ID NO: 145, SEQ ID NO: 148, SEQ ID NO: 151, SEQ ID NO: 154, SEQ ID NO: 157 or SEQ ID NO: 160, or a functional fragment or variant thereof.

[0267] The vaccines of the disclosure can be formulated using one or more excipients to: increase stability; increase cell transfection; permit the sustained or delayed release (e.g., from a depot formulation); alter the biodistribution (e.g., target to specific tissues or cell types); increase the translation of encoded protein in vivo; and/or alter the release profile of encoded protein (antigen) in vivo. In some embodiments therefore, the disclosed vaccine further comprises a pharmaceutically acceptable excipient. In addition to traditional excipients such as any and all solvents, dispersion media, diluents, or other liquid vehicles, dispersion or suspension aids, surface active agents, isotonic agents, thickening or emulsifying agents, preservatives, excipients can include, without limitation, lipidoids, liposomes, lipid nanoparticles, polymers, lipoplexes, core-shell nanoparticles, peptides, proteins, hyaluronidase, nanoparticle mimics and combinations thereof. In some embodiments, the pharmaceutically acceptable excipient is an adjuvant. In some embodiments, the vaccines of the disclosure do not include an adjuvant (they are adjuvant free).

[0268] In some embodiments, the vaccines of the disclosure are formulated in a nanoparticle as described herein elsewhere. In some embodiments, the vaccines of the disclosure are formulated in a lipid nanoparticle as described herein elsewhere. In some embodiments, the vaccines of the disclosure are formulated in a lipid-polycation complex, referred to as a cationic lipid nanoparticle, as described herein elsewhere. As a non-limiting example, the polycation may include a cationic peptide or a polypeptide such as, but not limited to, polylysine, polyornithine and/or polyarginine. In some embodiments, the vaccines of the disclosure are formulated in a lipid nanoparticle that includes a non-cationic lipid such as, but not limited to, cholesterol or dioleoyl phosphatidylethanolamine (DOPE) as described herein elsewhere.

[0269] In some embodiments, the vaccines of the disclosure are administered prophylactically as part of an active immunization scheme to healthy individuals. In some embodiments, the vaccines of the disclosure are administered therapeutically early in infection during the incubation phase. In some embodiments, the vaccines of the disclosure are administered therapeutically during active infection after onset of symptoms. In some embodiments, the amount of DNA or RNA (e.g., mRNA) vaccine of the present disclosure provided to a cell, a tissue or a subject may be an amount effective for immune prophylaxis. In some embodiments, the vaccines of the disclosure are administrated with other prophylactic or therapeutic compounds. In some embodiments, the prophylactic or therapeutic compound is an adjuvant. In some embodiments, the prophylactic or therapeutic compound is a booster. As used herein, when referring to a prophylactic composition, such as a vaccine, the term “booster” refers to an extra administration of the prophylactic (vaccine) composition. A booster (or booster vaccine) may be given after an earlier administration of the prophylactic composition. The time of administration between the initial administration of the prophylactic composition and the booster may be, but is not limited to, about 1, 2, 3, 4, 5, 6, 7, 8, 9, 10, 15, 20, 25, 30, 35, 40, 45, 50 or 55 minutes, or about 1, 2, 3, 4, 5, 6, 7, 8, 9, 10, 11, 12, 13, 14, 15, 16, 17, 18, 19, 20, 21, 22 or 23 hours, or about 1, 2, 3, 4, 5, 6, 7, 8, 9, 10, 15, 20, 25 or 30 days, or about 1, 2, 3, 4, 5, or 6 weeks, or about 1, 2, 3, 4, 5, 6, 7, 8, 9, 10, 11 or 12 months, or about 1, 2, 3, 4, 5, 6, 7, 8, 9, 10, 15, 20, 25, 30, 35, 40, 45 or 50 years. In some embodiments, the time of administration between the initial administration of the prophylactic composition and the booster is about 1 week. In some embodiments, the time of administration between the initial administration of the prophylactic composition and the booster is about 2 weeks. In some embodiments, the time of administration between the initial administration of the prophylactic composition and the booster is about 3 weeks. In some embodiments, the time of administration between the initial administration of the prophylactic composition and the booster is about 1 month. In some embodiments, the time of administration between the initial administration of the prophylactic composition and the booster is about 2 months. In some embodiments, the time of administration between the initial administration of the prophylactic composition and the booster is about 3 months. In some embodiments, the time of administration between the initial administration of the prophylactic composition and the booster is about 6 months. In some embodiments, the time of administration between the initial administration of the prophylactic composition and the booster is about 1 year.

### G. Kits

[0270] The materials described above as well as other materials can be packaged together in any suitable combination as a kit useful for performing, or aiding in the performance of, the disclosed method. It is useful if the kit components in a given kit are designed and adapted for use together in the disclosed method. For example disclosed are kits comprising any of the elements of the disclosed nucleic acid compositions. For example, disclosed are kits comprising nucleic acid sequences comprising a leader sequence, a linker sequence, a nucleic acid sequence encoding a self-assembling polypeptide, and/or a nucleic acid sequence encoding a viral antigen. In some embodiments, the kits can further comprise a plasmid backbone.

[0271] Other embodiments are described in the following non-limiting Examples. Various publications, including patents, published applications, technical articles and scholarly articles are cited throughout the specification. Each of these cited publications is incorporated by reference herein in its entirety.

### EXAMPLES

### Example 1. Experimental Validation of Prefusion CoV2 Trimers

[0272] The SARS-CoV-2 prefusion trimers would be tested by size-exclusion chromatography, multi-angle light scattering, ELISA binding to various receptors and anti-CoV2 antibodies, negative-stain EM to determine relative populations of prefusion states, SPR binding to various receptors and anti-CoV2 antibodies, native page western blots and thermal stability in buffer and serum using DSF. Collectively, these measurements will enable us to determine if the SARS-CoV-2 trimers have the relevant design characteristics. The trimers must demonstrate a homogenous, trimeric oligomerization state as determined by SEC-MALS, western blot and negative stain EM. The trimers must also have alterations in frequencies of relevant prefusion conformations as determined by negative stain EM. The trimers must bind to receptors (such as ACE2) or selected anti-CoV2 antibodies as determined by ELISA and SPR. The trimers must have an increase in thermal stability in PBS and serum as determined by DSF. Other equivalent biophysical methods to determine these parameters may be alternatively employed.

### Size-Exclusion Chromatography and Multi-Angle Light Scattering

[0273] Expi293F cells will be transfected with a plasmid vector carrying the trimer transgene with PEI/OPTI-MEM and harvested 6 days post-transfection. Transfection supernatant will be first purified with either affinity chromatography using the AKTA pure 25 system and an IMAC Nickel column OR gravity flow columns filled with GNL Lectin beads. The eluate fractions from the affinity purification will be pooled, concentrated and dialyzed into 1×PBS buffer before being loaded onto the SEC column and then purified with size exclusion chromatography, for which the Superdex 200 Increase 10/300 GL column or Superose 6 Increase 10/300 GL column or equivalent will be run at 0.5 mL/min. Identified eluate fractions will then collected and concentrated to 1 mg/mL in PBS. The oligomeric state of the trimers will then be confirmed by size exclusion chromatography-multi-angle light scattering (SECMALS) using the DAWN HELEOS II multi-angle light scattering system with Optilab T-rEX refractometer (Wyatt Technology).

### ELISA

[0274] The trimers will be assessed by ELISAs to determine binding against human ACE2 with a detectable tag. Nunc ELISA plates will be coated with 1 μg/ml rabbit anti-His6X in 1× PBS for 4-6 hours at room temperature and washed 4 times with washing buffer (1× PBS and 0.05% Tween 20). Plates will be blocked overnight at 4° C. with blocking buffer (1× PBS, 0.05% Tween 20, 5% evaporated milk and 1% FBS). Plates will be washed four times with washing buffer then incubated with full length (S1+S2) spike protein containing a C-terminal His tag (Sino Biologics, cat. 40589-V08B1) at 10 ug/ml for 1 hour at room temperature. Plates will be washed and then serial dilutions of recombinant human ACE2 with a human Fc tag (ACE2-IgHu) and incubated for 1-2 hours at room temperature. Plates will be again washed and then incubated with 1:10,000 dilution of horseradish peroxidase (HRP) conjugated anti-human IgG secondary antibody (Bethyl, cat. A80-304P) and incubated for 1 hour at room temperature. After final wash plates will be developed using 1-Step Ultra TMB-ELISA Substrate (ThermoFisher, cat. 34029) and the reaction stopped with 1 M Sulfuric Acid. Plates will be read at 450 nm wavelength within 30 minutes using a SpectraMax Plus 384 Microplate Reader (Molecular Devices, Sunnyvale, Calif.).

### Negative Stain EM of Purified SARS-CoV-2 Trimers

[0275] The trimers will be produced in Expi293 cells, purified using Agarose bound lectin beads (Agarose Galanthus Nivalis Lectin, Vector Laboratories) followed by size exclusion chromatography (GE Healthcare) using the Superose 6 Increase 10/300 GL column. The proteins will be further dialyzed into Tris-buffered saline (TBS). A total of 3 μL of purified proteins was adsorbed onto glow discharged carbon-coated Cu400 EM grids. The grids will be then stained with 3 μL of 2% uranyl acetate, blotted, and stained again with 3 μL of the stain followed by a final blot. Image collection and data processing will be performed on a FEI Tecnai T12 microscope equipped with a Oneview Gatan camera at 90,450× magnification at the camera and a pixel size of 1.66 Å.

### Surface Plasmon Resonance (SPR)

[0276] Kinetics and affinities of antibody-antigen interactions will be measured on a Biacore 8K (GE/Cytiva) using CAP (GE/Cytiva) or Protein A (GE/Cytiva) chips and 1× HBS-EP+ pH 7.4 running buffer (20× stock from Teknova, Cat. No H8022) supplemented with BSA at 1 mg/ml. Typically, 100-200 RUs of antigen or antibody will be captured onto each flow cell and analytes will be passed over the flow cell at 50 μL/min for 3 min followed by a 5 min dissociation time. Regeneration is accomplished using 6M Guanidine-HCL in 02.5M NaOH or 10 mM glycine-HCl at pH 1.5 with 180 seconds contact time. Raw sensograms will be analyzed using Biacore evaluation software (GE/Cytiva), including flow cell and blank double referencing, and either Equilibrium fits or Kinetic fits with Langmuir model, or both, will be employed when applicable. Analyte concentrations will be measured on a NanoDrop 2000c Spectrophotometer using Absorption signal at 280 nm.

### Differential Scanning Fluorimetry

[0277] The assay will employ a real-time PCR instrument to monitor changes in fluorescence of SYPRO Orange (or similar dye) and to determine melting temperatures. At least three temperature gradient scans will be run from room temperature to 120C at rate of 1-2C/min. Signals are normalized from 0 to 100. The SYPRO orange dye and the trimers added at appropriate concentration (2×-10× range and 100-1000 ug/ml, respectively) to optimize the experimental conditions. SYPRO orange has an excitation maximum near 500 nm and emission maximum near 600 nm. The real time system channel will be selected to optimize excitation and emission of SPYRO orange.

### Western Blot

[0278] Proteins will be separated on a 4-12% BIS-TRIS gel (ThermoFisher Scientific), then following transfer, blots will be incubated with ACE2 or an anti-SARS-CoV spike protein polyclonal antibody (Novus Biologicals) then visualized with horseradish peroxidase (HRP)-conjugated anti-mouse IgG (GE Amersham).

### Immunofluorescence of Transfected 293T Cells

[0279] For in vitro staining of trimer protein expression 293T cells will be cultured on 4-well glass slides (Lab-Tek) and transfected with 3 μg per well of pDNA using TurboFectin8.0 (OriGene) transfection reagent following the manufacturer's protocol. Cells will be fixed 48 hrs after transfection with 10% Neutral-buffered Formalin (BBC Biochemical, Wash. State) for 10 min at room temperature (RT) and then washed with PBS. Before staining, chamber slides will be blocked with 0.3% (v/v) Triton-X (Sigma), 2% (v/v) donkey serum in PBS for 1 hr at RT. Cells will be stained with a rabbit anti-SARS-CoV spike protein polyclonal antibody (Novus Biologicals) diluted in 1% (w/v) BSA (Sigma), 2% (v/v) donkey serum, 0.3% (v/v) Triton-X (Sigma) and 0.025% (v/v) 1 g ml⁻¹ Sodium Azide (Sigma) in PBS for 2 hrs at RT. Slides will be washed three times for 5 min in PBS and then stained with donkey anti-rabbit IgG AF488 (lifetechnologies) for 1 hr at RT. Slides will be washed again and mounted and covered with DAPI-Fluoromount (SouthernBiotech).

### Example 2. Vaccine Delivery Systems

### Recombinant Protein Vaccines

[0280] The SARS-CoV-2 Spike trimers described herein are amenable to delivery as a recombinant subunit vaccine. The trimers can be encoded into mammalian expression plasmids, such as pHLSEC. These plasmids can be employed to expressed and purified recombinant vaccines as described in this document. The recombinant proteins can be easily formulated with any number of adjuvant systems (such as aluminum phosphate) to enhance immunity.

### DNA Plasmid Vaccines

[0281] The SARS-CoV-2 Spike trimers described herein are amenable to delivery as a transgene in a DNA plasmid (such as Inovio Pharmaceutical's synDNA platform). DNA vaccines are non-infectious and have a long record of safety in humans. DNA vaccines can induce high seroconversion rates in people. DNA vaccines can induce both B and T cell immunities. DNA plasmids can be formulated with adjuvating material to improve take-up, immune trafficking and resulting immune responses.

### RNA Vaccines

[0282] The SARS-CoV-2 Spike trimers described herein are amenable to delivery as a transgene in an RNA vaccine (such as Moderna's mRNA platform). RNA vaccines are non-infectious, non-integrating and are naturally degrading. RNA vaccines have been shown to stimulate strong B cell responses to encoded transgenes. Naked RNA can be formulated with lipid nanoparticles (LNPs) to encapsulate RNA protecting the transgene from degradation.

### Self-Replicating RNA Vaccines

[0283] The SARS-CoV-2 Spike trimers described herein are amenable to delivery as a transgene in a self-replicating RNA vaccine formulated as DNA. RNA replicons can be delivered by a DNA or mRNA to self-amplify resulting in higher transgene expression.

### Adeno-Associated Virus Vaccines:

[0284] Modified versions of the SARS-CoV-2 Spike trimers described herein (such as ones which are capable of cell fusion by removal of key mutations impacting this function) are amenable to delivery as a transgene in AAV (or similar vector). AAV can be employed to obtain high expression of vaccine antigens in vivo. Numerous AAV variants exist to help target specific cell types and each can be explored with a SARS-CoV-2 Spike trimer.

### REFERENCES

[0285] [1] L. C. Lambert, A. S. Fauci, N Engl J Med 2010, 363, 2036.
[0286] [2] Y. Gao, P. F. McKay, J. F. S. Mann, Viruses 2018, 10.
[0287] [3] S. Plotkin, Proc Natl Acad Sci USA 2014, 111, 12283.
[0288] [4] C. L. Trimble, M. P. Morrow, K. A. Kraynyak, et al., Lancet 2015, 386, 2078.
[0289] [5] A. E. Gregory, R. Titball, D. Williamson, Front Cell Infect Microbiol 2013, 3, 13.
[0290] [6] L. Zhao, A. Seth, N. Wibowo, et al., Vaccine 2014, 32, 327.
[0291] [7] S. Al-Halifa, L. Gauthier, D. Arpin, et al., Front Immunol 2019, 10, 22.
[0292] [8] W. Szmuness, C. E. Stevens, E. J. Harley, et al., N Engl J Med 1980, 303, 833.
[0293] [9] D. M. Harper, L. R. DeMars, Gynecol Oncol 2017, 146, 196.
[0294] [10] J. W. Stone, N. J. Thornburg, D. L. Blum, et al., Nanotechnology 2013, 24, 295102.
[0295] [11] K. Cheng, K. El-Boubbou, C. C. Landry, ACS Appl Mater Interfaces 2012, 4, 235.
[0296] [12] A. K. Giddam, M. Zaman, et al., Nanomedicine (Lond) 2012, 7, 1877.
[0297] [13] J. Fuenmayor, F. Godia, L. Cervera, N Biotechnol 2017, 39, 174.
[0298] [14] S. A. Kaba, C. P. Karch, L. Seth, K. M. B. Ferlez, et al., Vaccine 2018, 36, 906.
[0299] [15] Z. Xu, D. W. Kulp, Curr Opin Immunol 2019, 59, 49.
[0300] [16] J. Marcandalli, B. Fiala, S. Ols, M. Perotti, et al., Cell 2019, 176, 1420.
[0301] [17] K. Sliepen, G. Ozorowski, J. A. Burger, et al., Retrovirology 2015, 12, 82.
[0302] [18] S. Chattopadhyay, J. Y. Chen, H. W. Chen, C. J. Hu, Nanotheranostics 2017, 1, 244.
[0303] [19] N. Desai, AAPS J 2012, 14, 282.
[0304] [20] J. Feng, et al., Journal of Translational Medicine 2019, 17, 200.
[0305] [21] L. H. Lua, N. K. Connors, F. Sainsbury, et al., Biotechnol Bioeng 2014, 111, 425.
[0306] [22] A. Urakami, M. M. Ngwe Tim, M. L. Moi, et al., J Virol 2017, 91.
[0307] [23] Z. Jiang, G. Tong, B. Cai, Y. Xu, J. Lou, Protein Expr Purif 2011, 80, 203.
[0308] [24] A. C. Eifler, C. S. Thaxton, Methods Mol Biol 2011, 726, 325.
[0309] [25] B. S. Graham, M. S. A. Gilman, J. S. McLellan, Annu Rev Med 2019, 70, 91.
[0310] [26] T. Tokatlian, B. J. Read, C. A. Jones, et al., Science 2019, 363, 649.
[0311] [27] J. G. Jardine, T. Ota, D. Sok, M. Pauthner, et al., Science 2015, 349, 156.
[0312] [28] D. Sok, B. Briney, J. G. Jardine, D. W. Kulp, et al., Science 2016, 353, 1557.
[0313] [29] J. G. Jardine, D. W. Kulp, C. Havenar-Daughton, et al., Science 2016, 351, 1458.
[0314] [30] K. A. Dowd, S. Y. Ko, K. M. Morabito, et al., Science 2016, 354, 237.
[0315] [31] B. S. Davis, G. J. Chang, B. Cropp, J. T. Roehrig, et al., J Virol 2001, 75, 4040.
[0316] [32] B. Wang, K. E. Ugen, et al., Proc Natl Acad Sci USA 1993, 90, 4156.
[0317] [33] N. Y. Sardesai, D. B. Weiner, Curr Opin Immunol 2011, 23, 421.
[0318] [34] Z. Xu, M. C. Wise, H. Choi, A. Perales-Puchalt, et al., EBioMedicine 2018, 35, 97.
[0319] [35] M. Khoshnejad, A. Patel, K. Wojtak, et al., Mol Ther 2019, 27, 188.
[0320] [36] M. C. Wise, Z. Xu, E. Tello-Ruiz, C. Beck, et al., J Clin Invest 2019.
[0321] [37] P. Tebas, C. C. Roberts, K. Muthumani, E. L. Reuschel, et al., N Engl J Med 2017.
[0322] [38] P. Tebas, K. A. Kraynyak, A. Patel, J. N. Maslow, et al., J Infect Dis 2019.
[0323] [39] S. A. Kalams, S. D. Parker, M. Elizaga, B. Metch, et al., J Infect Dis 2013, 208, 818.
[0324] [40] K. Modjarrad, C. C. Roberts, K. T. Mills, et al., Lancet Infect Dis 2019.
[0325] [41] F. Brod, K. Miura, I. Taylor, Y. Li, A. Marini, et al., Front Immunol 2018, 9, 2780.
[0326] [42] K. Tomusange, D. Wijesundara, J. Gummow, et al., Sci Rep 2016, 6, 29131.
[0327] [43] P. Abbink, R. A. Larocca, R. A. De La Barrera, C. A. Bricault, E. T. Moseley, M. Boyd, M. Kirilova, Z. Li, D. Ng'ang'a, O. Nanayakkara, et al., Science 2016, 353, 1129.
[0328] [44] C. Bohannon, R. Powers, L. Satyabhama, et al., Nat Commun 2016, 7, 11826.
[0329] [45] B. Selander, U. Martensson, A. Weintraub, et al., J Clin Invest 2006, 116, 1425.
[0330] [46] A. Benoit, J. Beran, J. M. Devaster, et al., Open Forum Infect Dis 2015, 2, ofv067.
[0331] [47] M. Kanekiyo, M. G. Joyce, R. A. Gillespie, et al., Nat Immunol 2019, 20, 362.
[0332] [48] M. A. Kutzler, D. B. Weiner, Nat Rev Genet 2008, 9, 776.
[0333] [49] S. Lu, S. Wang, J. M. Grimes-Serrano, Expert Rev Vaccines 2008, 7, 175.
[0334] [50] D. Hobernik, M. Bros, Int J Mol Sci 2018, 19.
[0335] [51] M. Kanekiyo, C. J. Wei, H. M. Yassine, et al., Nature 2013, 499, 102.
[0336] [52] R. B. Zinyama-Gutsire, C. Chasela, et al., PLoS One 2015, 10, e0122659.
[0337] [53] M. Dahl, A. Tybjaerg-Hansen, P. Schnohr, et al., J Exp Med 2004, 199, 1391.
[0338] [54] N. Zhang, M. J. Bevan, Immunity 2011, 35, 161.
[0339] [55] N. Van Braeckel-Budimir, J. T. Harty, Front Microbiol 2014, 5, 272.
[0340] [56] E. J. Grant, S. M. Quinones-Parra, et al., Curr Opin Virol 2016, 16, 132.
[0341] [57] M. Koutsakos, P. T. Illing, T. H. O. Nguyen, et al., Nat Immunol 2019, 20, 613.
[0342] [58] A. Durgeau, Y. Virk, S. Corgnac, F. Mami-Chouaib, Front Immunol 2018, 9, 14.
[0343] [59] S. Sasaki, R. R. Amara, A. E. Oran, et al., Nat Biotechnol 2001, 19, 543.
[0344] [60] M. A. Chattergoon, J. J. Kim, J. S. Yang, et al., Nat Biotechnol 2000, 18, 974.
[0345] [61] M. A. Chattergoon, T. M. Robinson, et al., J Immunol 1998, 160, 5707.
[0346] [62] O. Akbari, N. Panjwani, S. Garcia, R. Tascon, et al., J Exp Med 1999, 189, 169.
[0347] [63] J. Yan, M. P. Morrow, J. S. Chu, T. Racine, et al., Vaccine 2018, 36, 3079.
[0348] [64] P. M. Patel, C. H. Ottensmeier, et al., Oncoimmunology 2018, 7, e1433516.
[0349] [65] J. W. Labonte, J. Adolf-Bryfogle, et al., J Comput Chem 2017, 38, 276.
[0350] [66] D. W. Kulp, S. Subramaniam, J. E. Donald, et al., J Comput Chem 2012, 33, 1645.
[0351] [67] B. Briney, D. Sok, J. G. Jardine, D. W. Kulp, et al., Cell 2016, 166, 1459.
[0352] [68] E. K. Duperret, M. C. Wise, A. Trautz, et al., Mol Ther 2018, 26, 435.
[0353] [69] Torrents de la Pena A, et al. Cell Rep. 2017; 20(8):1805-17.
[0354] [70] Sanders R W, Moore J P. Immunol Rev. 2017; 275(1):161-82.
[0355] [71] Medina-Ramirez, M, et al., Journal of experimental medicine. 2017; 214(9):2573-90.
[0356] [72] F. Li, Annu. Rev. Virol., 2016, 3, 237-261.
[0357] [73] B. J. Bosch, R. van der Zee, et al., J. Virol., 2003, 77, 8801-8811.
[0358] [74] A. C. Walls, et al., Proc. Natl. Acad. Sci. U.S.A., 2017, 114, 11157-111629.
[0359] [75] M. Gui, et al., Cell Res., 2017, 27, 119-129.
[0360] [76] J. Pallesen, et al., Proc. Natl. Acad. Sci. U.S.A., 2017, 114, E7348-E7357.
[0361] [77] A. C. Walls, et al., Cell, 2019, 176, 1026-1039.e15.
[0362] [78] Y. Yuan et al., Nat. Commun., 2017, 8, 15092.

1. A composition comprising an expressible nucleic acid sequence comprising:
a) a first nucleic acid sequence encoding a scaffold domain comprising a self-assembling polypeptide; and
b) a second nucleic acid sequence encoding a viral antigen from a virus of the family Coronaviridae.

2. The composition of claim 1, wherein the self-assembling polypeptide is from Aquifex aeolicus, Helicobacter pylori, Pyrococcus furiosus or Thermotoga maritima.

3. The composition of claim 1, wherein the self-assembling polypeptide comprises at least 70% sequence identity to SEQ ID NO: 8, SEQ ID NO: 10, SEQ ID NO: 12, SEQ ID NO: 14, SEQ ID NO: 16, SEQ ID NO: 18, SEQ ID NO: 20, or a functional fragment or variant thereof.

4. (canceled)

5. The composition of claim 1, wherein the viral antigen is an antigen from SARS-CoV-2 comprising at least 70% sequence identity to SEQ ID NO: 60, SEQ ID NO: 62, SEQ ID NO: 64, SEQ ID NO: 66, SEQ ID NO: 171, SEQ ID NO: 172, SEQ ID NO: 173, SEQ ID NO: 174, SEQ ID NO: 175, SEQ ID NO: 176 or SEQ ID NO: 177, or a functional fragment or variant thereof.

6. (canceled)

7. The composition of claim 1, wherein the expressible nucleic acid sequence further comprises a third nucleic acid sequence encoding a leader sequence.

8. (canceled)

9. The composition of claim 1, wherein the expressible nucleic acid sequence further comprises a nucleic acid sequence encoding a linker, said nucleic acid sequence positioned between the first nucleic acid sequence and the second nucleic acid sequence in the 5′ to 3′ orientation.

10. (canceled)

11. The composition of claim 1, wherein the expressible nucleic acid sequence comprises at least 70% sequence identity to SEQ ID NO: 68, SEQ ID NO: 69, SEQ ID NO: 71, SEQ ID NO: 72, SEQ ID NO: 74, SEQ ID NO: 75, SEQ ID NO: 77, SEQ ID NO: 78, SEQ ID NO: 80, SEQ ID NO: 81, SEQ ID NO: 83, SEQ ID NO: 84, SEQ ID NO: 86, SEQ ID NO: 87, SEQ ID NO: 89 or SEQ ID NO: 90, or a functional fragment or variant thereof; wherein the expressible nucleic acid sequence encodes a polypeptide comprising at least 70% sequence identity to SEQ ID NO: 70, SEQ ID NO: 73, SEQ ID NO: 76, SEQ ID NO: 79, SEQ ID NO: 82, SEQ ID NO: 85, SEQ ID NO: 88 or SEQ ID NO: 91, or a functional fragment or variant thereof.

12. (canceled)

13. A composition comprising an expressible nucleic acid sequence comprising:
a) a first nucleic acid sequence encoding a leader sequence; and
b) a second nucleic acid sequence encoding a soluble viral trimer or a soluble monomer thereof, wherein the soluble viral trimer or the soluble monomer thereof is from a virus of the family Coronaviridae.

14. The composition of claim 13, wherein the leader sequence comprises at least 70% sequence identity to SEQ ID NO: 1 or SEQ ID NO: 5, or a functional fragment or variant thereof.

15. The composition of claim 13, wherein the soluble viral trimer or the soluble monomer thereof is from a coronavirus.

16. (canceled)

17. The composition of claim 13, wherein the soluble viral trimer or the soluble monomer thereof comprises at least 70% sequence identity to SEQ ID NO: 60, SEQ ID NO: 62, SEQ ID NO: 64, SEQ ID NO: 66, SEQ ID NO: 171, SEQ ID NO: 172, SEQ ID NO: 173, SEQ ID NO: 174, SEQ ID NO: 175, SEQ ID NO: 176 or SEQ ID NO: 177, or a functional fragment or variant thereof.

18. The composition of claim 13, wherein the expressible nucleic acid sequence further comprises a third nucleic acid sequence encoding a linker.

19. (canceled)

20. The composition of claim 13, wherein the soluble viral trimer or the soluble monomer thereof comprises at least a portion of SARS-CoV-2 spike protein.

21. The composition of claim 13, wherein the expressible nucleic acid sequence further comprises a nucleic acid sequence encoding a self-assembling polypeptide or a functional fragment or variant thereof.

22. (canceled)

23. The composition of claim 1, wherein the expressible nucleic acid sequence comprises at least 70% sequence identity to SEQ ID NO: 92, SEQ ID NO: 93, SEQ ID NO: 95, SEQ ID NO: 96, SEQ ID NO: 98, SEQ ID NO: 99, SEQ ID NO: 101, SEQ ID NO: 102, SEQ ID NO: 104, SEQ ID NO: 105, SEQ ID NO: 107, SEQ ID NO: 108, SEQ ID NO: 110, SEQ ID NO: 111, SEQ ID NO: 113, SEQ ID NO: 114, SEQ ID NO: 116, SEQ ID NO: 117, SEQ ID NO: 119, SEQ ID NO: 120, SEQ ID NO: 122, SEQ ID NO: 123, SEQ ID NO: 125, SEQ ID NO: 126, SEQ ID NO: 128, SEQ ID NO: 129, SEQ ID NO: 131, SEQ ID NO: 132, SEQ ID NO: 134, SEQ ID NO: 135, SEQ ID NO: 137, SEQ ID NO: 138, SEQ ID NO: 140, SEQ ID NO: 141, SEQ ID NO: 143, SEQ ID NO: 144, SEQ ID NO: 146, SEQ ID NO: 147, SEQ ID NO: 149, SEQ ID NO: 150, SEQ ID NO: 152, SEQ ID NO: 153, SEQ ID NO: 155, SEQ ID NO: 156, SEQ ID NO: 158 or SEQ ID NO: 159, or a functional fragment or variant thereof or wherein the expressible nucleic acid sequence encodes a polypeptide comprising at least 70% sequence identity to SEQ ID NO: 94, SEQ ID NO: 97, SEQ ID NO: 100, SEQ ID NO: 103, SEQ ID NO: 106, SEQ ID NO: 109, SEQ ID NO: 112, SEQ ID NO: 115, SEQ ID NO: 118, SEQ ID NO: 121, SEQ ID NO: 124, SEQ ID NO: 127, SEQ ID NO: 130, SEQ ID NO: 133, SEQ ID NO: 136, SEQ ID NO: 139, SEQ ID NO: 142, SEQ ID NO: 145, SEQ ID NO: 148, SEQ ID NO: 151, SEQ ID NO: 154, SEQ ID NO: 157 or SEQ ID NO: 160, or a functional fragment or variant thereof.

24.-27. (canceled)

28. A pharmaceutical composition comprising (i) the composition of claim 13, and (ii) a pharmaceutically acceptable carrier.

29. The pharmaceutical composition of claim 28, wherein the composition of claim 13 is in an amount from about 1 to about 100 micrograms.

30. (canceled)

31. A method of vaccinating a subject comprising administering a therapeutically effective amount of the pharmaceutical composition of claim 28 to the subject.

32.-34. (canceled)

35. The method of claim 31, wherein the method is free of activating any mannose-binding lectin or complement process.

36.-37. (canceled)

38. The method of claim 31, wherein the therapeutically effective dose is from about 0.001 microgram of composition per kilogram of the subject to about 0.05 microgram per kilogram of the subject.

39. A method of inducing an immune response in a subject comprising administering to the subject the pharmaceutical composition of claim 28.

40.-50. (canceled)

51. A method of neutralizing one or a plurality of viruses in a subject comprising administering to the subject the pharmaceutical composition of claim 28.

52.-67. (canceled)

68. A method of inducing expression of a self-assembling vaccine in a subject comprising administering the pharmaceutical composition of claim 28.

69. The method of claim 68, wherein the method is free of administering any polypeptide directly to the subject.

70.-126. (canceled)

The application's sequence listing, which the Patent Office published only in electronic form, follows.

SEQUENCE LISTING (177 sequences)

SEQ ID NO: 1 - protein, 18 aa, Artificial Sequence
  MD39 leader sequence (IgE leader sequence)
MDWTWILFLVAAATRVHS

SEQ ID NO: 2 - DNA, 54 bp, Artificial Sequence
  MD39 leader sequence (IgE leader sequence)
atggactggacatggattctgttcctggtcgctgccgctacaagagtgcattcc

SEQ ID NO: 3 - DNA, 54 bp, Artificial Sequence
  CPG9.2 sequence encoding MD39 leader sequence
atggattggacttggattctgttcctggtcgcagcagccacacgagtgcatagc

SEQ ID NO: 4 - DNA, 54 bp, Artificial Sequence
  MD39 leader coding sequence
atggactggacctggattctgttcctggtggccgccgccacaagggtgcacagc

SEQ ID NO: 5 - protein, 19 aa, Artificial Sequence
  Leader sequence
MDWTWRILFLVAAATGTHA

SEQ ID NO: 6 - DNA, 132 bp, Artificial Sequence
  Leader coding sequence
atggactggacctggagaatcctgttcctggtggccgccgccaccggcacacacgccgatacacacttccccatctgcatcttttgctgtggctgttgccataggtccaagtgtgggatgtgctgcaaaact

SEQ ID NO: 7 - DNA, 462 bp, Artificial Sequence
  LS scaffold
atgcagatctacgaaggaaaactgaccgctgagggactgaggttcggaattgtcgcaagccgcgcgaatcacgcactggtggataggctggtggaaggcgctatcgacgcaattgtccggcacggcgggagagaggaagacatcacactggtgagagtctgcggcagctgggagattcccgtggcagctggagaactggctcgaaaggaggacatcgatgccgtgatcgctattggggtcctgtgccgaggagcaactcccagcttcgactacatcgcctcagaagtgagcaaggggctggctgatctgtccctggagctgaggaaacctatcacttttggcgtgattactgccgacaccctggaacaggcaatcgaggcggccggcacctgccatggaaacaaaggctgggaagcagccctgtgcgctattgagatggcaaatctgttcaaatctctgcga

SEQ ID NO: 8 - protein, 154 aa, Artificial Sequence
  LS scaffold
MQIYEGKLTAEGLRFGIVASRANHALVDRLVEGAIDAIVRHGGREEDITLVRVCGSWEIPVAAGELARKEDIDAVIAIGVLCRGATPSFDYIASEVSKGLADLSLELRKPITFGVITADTLEQAIEAAGTCHGNKGWEAALCAIEMANLFKSLR

SEQ ID NO: 9 - DNA, 501 bp, Artificial Sequence
  3BVE scaffold
gggctgagtaaggacattatcaagctgctgaacgaacaggtgaacaaagagatgcagtctagcaacctgtacatgtccatgagctcctggtgctatacccactctctggacggagcaggcctgttcctgtttgatcacgccgccgaggagtacgagcacgccaagaagctgatcatcttcctgaatgagaacaatgtgcccgtgcagctgacctctatcagcgcccctgagcacaagttcgagggcctgacacagatctttcagaaggcctacgagcacgagcagcacatctccgagtctatcaacaatatcgtggaccacgccatcaagtccaaggatcacgccacattcaactttctgcagtggtacgtggccgagcagcacgaggaggaggtgctgtttaaggacatcctggataagatcgagctgatcggcaatgagaaccacgggctgtacctggcagatcagtatgtcaagggcatcgctaagtcaaggaaaagc

SEQ ID NO: 10 - protein, 167 aa, Artificial Sequence
  3BVE scaffold
GLSKDIIKLLNEQVNKEMQSSNLYMSMSSWCYTHSLDGAGLFLFDHAAEEYEHAKKLIIFLNENNVPVQLTSISAPEHKFEGLTQIFQKAYEHEQHISESINNIVDHAIKSKDHATFNFLQWYVAEQHEEEVLFKDILDKIELIGNENHGLYLADQYVKGIAKSRKS

SEQ ID NO: 11 - DNA, 1032 bp, Artificial Sequence
  RBE scaffold
ctgagcattgcccccacactgattaaccgggacaaaccctacaccaaagaggaactgatggagattctgagactggctattatcgctgagctggacgccatcaacctgtacgagcagatggcccggtattctgaggacgagaatgtgcgcaagatcctgctggatgtggccagggaggagaaggcacacgtgggagagttcatggccctgctgctgaacctggaccccgagcaggtgaccgagctgaagggcggctttgaggaggtgaaggagctgacaggcatcgaggcccacatcaacgacaataagaaggaggagagcaacgtggagtatttcgagaagctgagatccgccctgctggatggcgtgaataagggcaggagcctgctgaagcacctgcctgtgaccaggatcgagggccagagcttcagagtggacatcatcaagtttgaggatggcgtgcgcgtggtgaagcaggagtacaagcccatccctctgctgaagaagaagttctacgtgggcatcagggagctgaacgacggcacctacgatgtgagcatcgccacaaaggccggcgagctgctggtgaaggacgaggagtccctggtcatccgcgagatcctgtctacagagggcatcaagaagatgaagctgagctcctgggacaatccagaggaggccctgaacgatctgatgaatgccctgcaggaggcatctaacgcaagcgccggaccattcggcctgatcatcaatcccaagagatacgccaagctgctgaagatctatgagaagtccggcaagatgctggtggaggtgctgaaggagatcttccggggcggcatcatcgtgaccctgaacatcgatgagaacaaagtgatcatctttgccaacacccctgccgtgctggacgtggtggtgggacaggatgtgacactgcaggagctgggaccagagggcgacgatgtggcctttctggtgtccgaggccatcggcatcaggatcaagaatccagaggcaatcgtggtgctggag

SEQ ID NO: 12 - protein, 344 aa, Artificial Sequence
  RBE scaffold
LSIAPTLINRDKPYTKEELMEILRLAIIAELDAINLYEQMARYSEDENVRKILLDVAREEKAHVGEFMALLLNLDPEQVTELKGGFEEVKELTGIEAHINDNKKEESNVEYFEKLRSALLDGVNKGRSLLKHLPVTRIEGQSFRVDIIKFEDGVRVVKQEYKPIPLLKKKFYVGIRELNDGTYDVSIATKAGELLVKDEESLVIREILSTEGIKKMKLSSWDNPEEALNDLMNALQEASNASAGPFGLIINPKRYAKLLKIYEKSGKMLVEVLKEIFRGGIIVTLNIDENKVIIFANTPAVLDVVVGQDVTLQELGPEGDDVAFLVSEAIGIRIKNPEAIVVLE

SEQ ID NO: 13 - DNA, 615 bp, Artificial Sequence
  I3 scaffold
atgaagatggaagaactgttcaagaagcacaagatcgtggccgtgctgagggccaactccgtggaggaggccaagaagaaggccctggccgtgttcctgggcggcgtgcacctgatcgagatcacctttacagtgcccgacgccgataccgtgatcaaggagctgtctttcctgaaggagatgggagcaatcatcggagcaggaaccgtgacaagcgtggagcagtgcagaaaggccgtggagagcggcgccgagtttatcgtgtcccctcacctggacgaggagatctctcagttctgtaaggagaagggcgtgttttacatgccaggcgtgatgacccccacagagctggtgaaggccatgaagctgggccacacaatcctgaagctgttccctggcgaggtggtgggcccacagtttgtgaaggccatgaagggccccttccctaatgtgaagtttgtgcccaccggcggcgtgaacctggataacgtgtgcgagtggttcaaggcaggcgtgctggcagtgggcgtgggcagcgccctggtgaagggcacacccgtggaagtcgctgagaaggcaaaggcattcgtggaaaagattagggggtgtactgag

SEQ ID NO: 14 - protein, 205 aa, Artificial Sequence
  I3 scaffold
MKMEELFKKHKIVAVLRANSVEEAKKKALAVFLGGVHLIEITFTVPDADTVIKELSFLKEMGAIIGAGTVTSVEQCRKAVESGAEFIVSPHLDEEISQFCKEKGVFYMPGVMTPTELVKAMKLGHTILKLFPGEVVGPQFVKAMKGPFPNVKFVPTGGVNLDNVCEWFKAGVLAVGVGSALVKGTPVEVAEKAKAFVEKIRGCTE

SEQ ID NO: 15 - DNA, 396 bp, Artificial Sequence
  QB scaffold
gcaaagctggagacagtgacactgggcaacatcggcaaggacggcaagcagacactggtgctgaatcccaggggcgtgaaccctaccaatggagtggcatctctgagccaggcaggagcagtgcctgccctggagaagagagtgaccgtgtccgtgtctcagcccagcaggaacagaaagaattataaggtgcaggtgaagatccagaacccaaccgcctgcacagccaatggcagctgtgacccatccgtgacaaggcaggcatacgcagatgtgaccttctcttttacacagtatagcaccgatgaggagagggccttcgtgcgcaccgagctggccgccctgctggcatcccctctgctgattgacgctattgaccagctgaaccctgcttac

SEQ ID NO: 16 - protein, 132 aa, Artificial Sequence
  QB scaffold
AKLETVTLGNIGKDGKQTLVLNPRGVNPTNGVASLSQAGAVPALEKRVTVSVSQPSRNRKNYKVQVKIQNPTACTANGSCDPSVTRQAYADVTFSFTQYSTDEERAFVRTELAALLASPLLIDAIDQLNPAY

SEQ ID NO: 17 - DNA, 174 bp, Artificial Sequence
  IC1 scaffold
gaccctgagtttaccaaaaatgctctgaatgtcgtcaaaaatgatctgattgctaaggtggaccagctgagcggagagcaggaggtgctgaggggcgagctggaggccgccaagcaggcaaaggtgaaactggaaaaccgaatcaaggaactggaagaagaactgaaaagagtc

SEQ ID NO: 18 - protein, 58 aa, Artificial Sequence
  IC1 scaffold
DPEFTKNALNVVKNDLIAKVDQLSGEQEVLRGELEAAKQAKVKLENRIKELEEELKRV

SEQ ID NO: 19 - DNA, 465 bp, Artificial Sequence
  IC2 scaffold
gccgaccccaagaaggtgctggataaagccaaagatcaggcagaaaatagagtcagggaactgaagcagaagctggaggagctgtacaaggaggcccggaagctggacctgacccaggagatgaggagaaagctggagctgcgctacatcgccgccatgctgatggccatcggcgacatctataacgccatcaggcaggccaagcaggaggccgataagctgaagaaggccggcctggtgaatagccagcagctggacgagctgaagcggcgcctggaggagctgaaggaggaggccagcaggaaggccagagattacggcagggagttccagctgaagctggagtatggcggcggcagcggctccggctctggcggcaagatcgagcagatcctgcagaagatcgaaaagatcctgcagaagattgagtggattctgcagaagattgaacagatcctgcagggg

SEQ ID NO: 20 - protein, 155 aa, Artificial Sequence
  IC2 scaffold
ADPKKVLDKAKDQAENRVRELKQKLEELYKEARKLDLTQEMRRKLELRYIAAMLMAIGDIYNAIRQAKQEADKLKKAGLVNSQQLDELKRRLEELKEEASRKARDYGREFQLKLEYGGGSGSGSGGKIEQILQKIEKILQKIEWILQKIEQILQG

SEQ ID NO: 21 - DNA, 45 bp, Artificial Sequence
  Linker
ggaggctccggaggatctggagggagtggaggctcaggaggaggc

SEQ ID NO: 22 - protein, 15 aa, Artificial Sequence
  Linker
GGSGGSGGSGGSGGG

SEQ ID NO: 23 - protein, 9 aa, Artificial Sequence
  Linker
GGSGGSGGS

SEQ ID NO: 24 - protein, 12 aa, Artificial Sequence
  Linker
GGSGGSGGSGGS

SEQ ID NO: 25 - protein, 24 aa, Artificial Sequence
  Linker
GGSGGSGGSGGSGGGGSGGGSGGG

SEQ ID NO: 26 - protein, 241 aa, Artificial Sequence
  4QTL-115 linker
NEDDMKKLYKQMVQELEKARDRMEKLYKEMVELIQKAIELMRKIFQEVKQEVEKAIEEMKKLYDEAKKKIEQMIQQIKQGGDKQKMEELLKRAKEEMKKVKDKMEKLLEKLKQIMQEAKQKMEKLLKQLKEEMKKMKEKMEKLLKEMKQRMEEVKKKMDGDDELLEKIKKNIDDLKKIAEDLIKKAEENIKEAKKIAEQLVKRAKQLIEKAKQVAEELIKKILQLIEKAKEIAEKVLKGLE

SEQ ID NO: 27 - DNA, 72 bp, Artificial Sequence
  Linker
ggcggctctggcggaagtggcggaagtgggggaagtggaggcggcggaagcgggggaggcagcgggggaggg

SEQ ID NO: 28 - DNA, 27 bp, Artificial Sequence
  Linker
ggcggaagcggcggaagcggcgggtct

SEQ ID NO: 29 - DNA, 36 bp, Artificial Sequence
  Linker
ggcggcagcggcggcagcggcgggagcggaggaagt

SEQ ID NO: 30 - DNA, 72 bp, Artificial Sequence; identical to SEQ ID NO: 27
  Linker

SEQ ID NO: 31 - DNA, 42 bp, Artificial Sequence
  Linker
tctcacagcggctccggcggctctggcagcggcggccacgcc

SEQ ID NO: 32 - protein, 14 aa, Artificial Sequence
  Linker
SHSGSGGSGSGGHA

SEQ ID NO: 33 - DNA, 18 bp, Artificial Sequence
  CPG9.2 linker 1
gggggaaatagtagcggc

SEQ ID NO: 34 - protein, 6 aa, Artificial Sequence
  CPG9.2 linker 1
GGNSSG

SEQ ID NO: 35 - DNA, 54 bp, Artificial Sequence
  CPG9.2 linker 2
ggcggcaacggcagcggcggcggcagcggctccggcggcaacggctctagcggc

SEQ ID NO: 36 - protein, 18 aa, Artificial Sequence
  CPG9.2 linker 2
GGNGSGGGSGSGGNGSSG

SEQ ID NO: 37 - DNA, 57 bp, Artificial Sequence
  PDGFR linker
ggaggaggaagcgggggaagcgggggaagcggaggaagcgggggaagcgggggaagc

SEQ ID NO: 38 - protein, 19 aa, Artificial Sequence
  PDGFR linker
GGGSGGSGGSGGSGGSGGS

SEQ ID NO: 39 - DNA, 30 bp, Artificial Sequence
  Foldon PDGFR linker 1
ggaggaggaagcgggggaagcggcggcggc

SEQ ID NO: 40 - protein, 10 aa, Artificial Sequence
  Foldon PDGFR linker 1
GGGSGGSGGG

SEQ ID NO: 41 - DNA, 36 bp, Artificial Sequence
  Foldon PDGFR linker 2
gggggaagcggaggaagcgggggaagcgggggaagc

SEQ ID NO: 42 - protein, 12 aa, Artificial Sequence
  Foldon PDGFR linker 2
GGSGGSGGSGGS

SEQ ID NO: 43 - DNA, 9 bp, Artificial Sequence
  3BVE linker
ggaagcggc

SEQ ID NO: 44 - protein, 3 aa, Artificial Sequence
  3BVE linker
GSG

SEQ ID NO: 45 - DNA, 30 bp, Artificial Sequence
  I3_1 linker
ggcggcagcggcagcggcgggagcggagga

SEQ ID NO: 46 - protein, 10 aa, Artificial Sequence
  I3_1 linker
GGSGSGGSGG

SEQ ID NO: 47 - DNA, 333 bp, Artificial Sequence
  I3_2 linker
ggagggagcgatatgagaaaggacgccgagagacggtttgataagttcgtggaggctgctaagaataagtttgacaagtttaaggctgccctgcggaagggcgacatcaaggaggagaggagaaaggatatgaagaagctggcaaggaaggaggcagagcaggcaaggagggccgtgaggaacagactgagcgagctgctgtccaagatcaacgacatgcccatcaccaatgatcagaagaagctgatgtctaatgacgtgctgaagttcgccgcagaagccgaaaagaagattgaagccctggcagcagacgccgaaggaggaagcgggagc

SEQ ID NO: 48 - protein, 111 aa, Artificial Sequence
  I3_2 linker
GGSDMRKDAERRFDKFVEAAKNKFDKFKAALRKGDIKEERRKDMKKLARKEAEQARRAVRNRLSELLSKINDMPITNDQKKLMSNDVLKFAAEAEKKIEALAADAEGGSGS

SEQ ID NO: 49 - DNA, 183 bp, Artificial Sequence
  LS_1 linker
gggggctctagcgggaaaagtctggtggataccgtctatgctctgaaagatgaggtgcaggaactgaggcaggacaacaaaaagatgaagaagagcctggaggaggagcagagggccagaaaggacctggaaaaactggtgcggaaagtgctgaaaaacatgaatgacggagggagtagcggg

SEQ ID NO: 50 - protein, 61 aa, Artificial Sequence
  LS_1 linker
GGSSGKSLVDTVYALKDEVQELRQDNKKMKKSLEEEQRARKDLEKLVRKVLKNMNDGGSSG

SEQ ID NO: 51 - DNA, 390 bp, Artificial Sequence
  LS_2 linker
gggggctctagcggggcagacccaaagaaagtgctggataaggcaaaggatcaggcagagaatagagtgagagaactgaaacagaaactggaggaactgtataaggaggcccggaagctggacctgacccaggagatgaggagaaagctggagctgcgctacatcgccgccatgctgatggccatcggcgacatctataacgccatcaggcaggccaagcaggaggccgataagctgaagaaggccggcctggtgaatagccagcagctggacgagctgaagcggcgcctggaggagctgaaggaggaggcctccaggaaggccagagattatgggcgggaatttcagctgaaactggagtatggcggcggaagcggaagcgggagcggg

SEQ ID NO: 52 - protein, 130 aa, Artificial Sequence
  LS_2 linker
GGSSGADPKKVLDKAKDQAENRVRELKQKLEELYKEARKLDLTQEMRRKLELRYIAAMLMAIGDIYNAIRQAKQEADKLKKAGLVNSQQLDELKRRLEELKEEASRKARDYGREFQLKLEYGGGSGSGSG

SEQ ID NO: 53 - DNA, 348 bp, Artificial Sequence
  QB_1 linker
ggaggctcttcaggcggcacagacgtgggggcaatcgctggaaaggctaacgaggctggacagggggcttatgatgctcaggtcaaaaacgacgagcaggatgtggagctggccgaccacgaggccaggatcaagcagctgagaatcgatgtggacgatcacgagtctcggatcaccgccaacacaaaggccatcacagccctgaatgtgcgcgtgaccacagcagagggagagatcgcatccctgcagaccaacgtgagcgccctggacggaagggtgaccacagcagagaacaatatctccgccctgcaggcagattacgtgagcggcggcagctccggctccgga

SEQ ID NO: 54 - protein, 116 aa, Artificial Sequence
  QB_1 linker
GGSSGGTDVGAIAGKANEAGQGAYDAQVKNDEQDVELADHEARIKQLRIDVDDHESRITANTKAITALNVRVTTAEGEIASLQTNVSALDGRVTTAENNISALQADYVSGGSSGSG

SEQ ID NO: 55 - DNA, 450 bp, Artificial Sequence
  QB_2 linker
ggaggctctggaagcgggggaagtagcggacctcacatgattgctccaggacatcgggacgagtttgaccctaagctgccaacaggcgagaaagaagaggtgccaggcaagcccggcatcaagaaccctgagacaggcgacgtggtgaggccccctgtggattctgtgacaaagtacggcccagtgaagggcgacagcatcgtggagaaggaggagatccccttcgagaaggagaggaagtttaaccctgatctggccccaggcaccgagaaggtgacaagagagggccagaagggcgagaagaccatcaccacacccacactgaagaatcctctgaccggcgagatcatcagcaagggcgagtccaaggaggagatcacaaaggaccccatcaacgaactgaccgaatggggaccagagacaggaggaagcggcagcggcggaagcagc

SEQ ID NO: 56 - protein, 150 aa, Artificial Sequence
  QB_2 linker
GGSGSGGSSGPHMIAPGHRDEFDPKLPTGEKEEVPGKPGIKNPETGDVVRPPVDSVTKYGPVKGDSIVEKEEIPFEKERKFNPDLAPGTEKVTREGQKGEKTITTPTLKNPLTGEIISKGESKEEITKDPINELTEWGPETGGSGSGGSS

SEQ ID NO: 57 - DNA, 24 bp, Artificial Sequence
  IC1/IC2 linker
ggaggcagcggcagcggcagcggg

SEQ ID NO: 58 - protein, 8 aa, Artificial Sequence
  IC1/IC2 linker
GGSGSGSG

SEQ ID NO: 59 - DNA, 3822 bp, Severe acute respiratory syndrome coronavirus 2
atgtttgtttttcttgttttattgccactagtctctagtcagtgtgttaatcttacaaccagaactcaattaccccctgcatacactaattctttcacacgtggtgtttattaccctgacaaagttttcagatcctcagttttacattcaactcaggacttgttcttacctttcttttccaatgttacttggttccatgctatacatgtctctgggaccaatggtactaagaggtttgataaccctgtcctaccatttaatgatggtgtttattttgcttccactgagaagtctaacataataagaggctggatttttggtactactttagattcgaagacccagtccctacttattgttaataacgctactaatgttgttattaaagtctgtgaatttcaattttgtaatgatccatttttgggtgtttattaccacaaaaacaacaaaagttggatggaaagtgagttcagagtttattctagtgcgaataattgcacttttgaatatgtctctcagccttttcttatggaccttgaaggaaaacagggtaatttcaaaaatcttagggaatttgtgtttaagaatattgatggttattttaaaatatattctaagcacacgcctattaatttagtgcgtgatctccctcagggtttttcggctttagaaccattggtagatttgccaataggtattaacatcactaggtttcaaactttacttgctttacatagaagttatttgactcctggtgattcttcttcaggttggacagctggtgctgcagcttattatgtgggttatcttcaacctaggacttttctattaaaatataatgaaaatggaaccattacagatgctgtagactgtgcacttgaccctctctcagaaacaaagtgtacgttgaaatccttcactgtagaaaaaggaatctatcaaacttctaactttagagtccaaccaacagaatctattgttagatttcctaatattacaaacttgtgcccttttggtgaagtttttaacgccaccagatttgcatctgtttatgcttggaacaggaagagaatcagcaactgtgttgctgattattctgtcctatataattccgcatcattttccacttttaagtgttatggagtgtctcctactaaattaaatgatctctgctttactaatgtctatgcagattcatttgtaattagaggtgatgaagtcagacaaatcgctccagggcaaactggaaagattgctgattataattataaattaccagatgattttacaggctgcgttatagcttggaattctaacaatcttgattctaaggttggtggtaattataattacctgtatagattgtttaggaagtctaatctcaaaccttttgagagagatatttcaactgaaatctatcaggccggtagcacaccttgtaatggtgttgaaggttttaattgttactttcctttacaatcatatggtttccaacccactaatggtgttggttaccaaccatacagagtagtagtactttcttttgaacttctacatgcaccagcaactgtttgtggacctaaaaagtctactaatttggttaaaaacaaatgtgtcaatttcaacttcaatggtttaacaggcacaggtgttcttactgagtctaacaaaaagtttctgcctttccaacaatttggcagagacattgctgacactactgatgctgtccgtgatccacagacacttgagattcttgacattacaccatgttcttttggtggtgtcagtgttataacaccaggaacaaatacttctaaccaggttgctgttctttatcaggatgttaactgcacagaagtccctgttgctattcatgcagatcaacttactcctacttggcgtgtttattctacaggttctaatgtttttcaaacacgtgcaggctgtttaataggggctgaacatgtcaacaactcatatgagtgtgacatacccattggtgcaggtatatgcgctagttatcagactcagactaattctcctcggcgggcacgtagtgtagctagtcaatccatcattgcctacactatgtcacttggtgcagaaaattcagttgcttactctaataactctattgccatacccacaaattttactattagtgttaccacagaaattctaccagtgtctatgaccaagacatcagtagattgtacaatgtacatttgtggtgattcaactgaatgcagcaatcttttgttgcaatatggcagtttttgtacacaattaaaccgtgctttaactggaatagctgttgaacaagacaaaaacacccaagaagtttttgcacaagtcaaacaaatttacaaaacaccaccaattaaagattttggtggttttaatttttcacaaatattaccagatccatcaaaaccaagcaagaggtcatttattgaagatctacttttcaacaaagtgacacttgcagatgctggcttcatcaaacaatatggtgattgccttggtgatattgctgctagagacctcatttgtgcacaaaagtttaacggccttactgttttgccacctttgctcacagatgaaatgattgctcaatacacttctgcactgttagcgggtacaatcacttctggttggacctttggtgcaggtgctgcattacaaataccatttgctatgcaaatggcttataggtttaatggtattggagttacacagaatgttctctatgagaaccaaaaattgattgccaaccaatttaatagtgctattggcaaaattcaagactcactttcttccacagcaagtgcacttggaaaacttcaagatgtggtcaaccaaaatgcacaagctttaaacacgcttgttaaacaacttagctccaattttggtgcaatttcaagtgttttaaatgatatcctttcacgtcttgacaaagttgaggctgaagtgcaaattgataggttgatcacaggcagacttcaaagtttgcagacatatgtgactcaacaattaattagagctgcagaaatcagagcttctgctaatcttgctgctactaaaatgtcagagtgtgtacttggacaatcaaaaagagttgatttttgtggaaagggctatcatcttatgtccttccctcagtcagcacctcatggtgtagtcttcttgcatgtgacttatgtccctgcacaagaaaagaacttcacaactgctcctgccatttgtcatgatggaaaagcacactttcctcgtgaaggtgtctttgtttcaaatggcacacactggtttgtaacacaaaggaatttttatgaaccacaaatcattactacagacaacacatttgtgtctggtaactgtgatgttgtaataggaattgtcaacaacacagtttatgatcctttgcaacctgaattagactcattcaaggaggagttagataaatattttaagaatcatacatcaccagatgttgatttaggtgacatctctggcattaatgcttcagttgtaaacattcaaaaagaaattgaccgcctcaatgaggttgccaagaatttaaatgaatctctcatcgatctccaagaacttggaaagtatgagcagtatataaaatggccatggtacatttggctaggttttatagctggcttgattgccatagtaatggtgacaattatgctttgctgtatgaccagttgctgtagttgtctcaagggctgttgttcttgtggatcctgctgcaaatttgatgaagacgactctgagccagtgctcaaaggagtcaaattacattacacataa

SEQ ID NO: 60 - protein, 1273 aa, Severe acute respiratory syndrome coronavirus 2
MFVFLVLLPLVSSQCVNLTTRTQLPPAYTNSFTRGVYYPDKVFRSSVLHSTQDLFLPFFSNVTWFHAIHVSGTNGTKRFDNPVLPFNDGVYFASTEKSNIIRGWIFGTTLDSKTQSLLIVNNATNVVIKVCEFQFCNDPFLGVYYHKNNKSWMESEFRVYSSANNCTFEYVSQPFLMDLEGKQGNFKNLREFVFKNIDGYFKIYSKHTPINLVRDLPQGFSALEPLVDLPIGINITRFQTLLALHRSYLTPGDSSSGWTAGAAAYYVGYLQPRTFLLKYNENGTITDAVDCALDPLSETKCTLKSFTVEKGIYQTSNFRVQPTESIVRFPNITNLCPFGEVFNATRFASVYAWNRKRISNCVADYSVLYNSASFSTFKCYGVSPTKLNDLCFTNVYADSFVIRGDEVRQIAPGQTGKIADYNYKLPDDFTGCVIAWNSNNLDSKVGGNYNYLYRLFRKSNLKPFERDISTEIYQAGSTPCNGVEGFNCYFPLQSYGFQPTNGVGYQPYRVVVLSFELLHAPATVCGPKKSTNLVKNKCVNFNFNGLTGTGVLTESNKKFLPFQQFGRDIADTTDAVRDPQTLEILDITPCSFGGVSVITPGTNTSNQVAVLYQDVNCTEVPVAIHADQLTPTWRVYSTGSNVFQTRAGCLIGAEHVNNSYECDIPIGAGICASYQTQTNSPRRARSVASQSIIAYTMSLGAENSVAYSNNSIAIPTNFTISVTTEILPVSMTKTSVDCTMYICGDSTECSNLLLQYGSFCTQLNRALTGIAVEQDKNTQEVFAQVKQIYKTPPIKDFGGFNFSQILPDPSKPSKRSFIEDLLFNKVTLADAGFIKQYGDCLGDIAARDLICAQKFNGLTVLPPLLTDEMIAQYTSALLAGTITSGWTFGAGAALQIPFAMQMAYRFNGIGVTQNVLYENQKLIANQFNSAIGKIQDSLSSTASALGKLQDVVNQNAQALNTLVKQLSSNFGAISSVLNDILSRLDKVEAEVQIDRLITGRLQSLQTYVTQQLIRAAEIRASANLAATKMSECVLGQSKRVDFCGKGYHLMSFPQSAPHGVVFLHVTYVPAQEKNFTTAPAICHDGKAHFPREGVFVSNGTHWFVTQRNFYEPQIITTDNTFVSGNCDVVIGIVNNTVYDPLQPELDSFKEELDKYFKNHTSPDVDLGDISGINASVVNIQKEIDRLNEVAKNLNESLIDLQELGKYEQYIKWPWYIWLGFIAGLIAIVMVTIMLCCMTSCCSCLKGCCSCGSCCKFDEDDSEPVLKGVKLHYT

SEQ ID NO: 61 - DNA, 228 bp, Severe acute respiratory syndrome coronavirus 2
atgtactcattcgtttcggaagagacaggtacgttaatagttaatagcgtacttctttttcttgctttcgtggtattcttgctagttacactagccatccttactgcgcttcgattgtgtgcgtactgctgcaatattgttaacgtgagtcttgtaaaaccttctttttacgtttactctcgtgttaaaaatctgaattcttctagagttcctgatcttctggtctaa

SEQ ID NO: 62 - protein, 75 aa, Severe acute respiratory syndrome coronavirus 2
MYSFVSEETGTLIVNSVLLFLAFVVFLLVTLAILTALRLCAYCCNIVNVSLVKPSFYVYSRVKNLNSSRVPDLLV

SEQ ID NO: 63 - DNA, 671 bp, Severe acute respiratory syndrome coronavirus 2
ccatggcagattccaacggtactattaccgttgaagagcttaaaaagctccttgaacaatggaacctagtaataggtttcctattccttacatggatttgtcttctacaatttgcctatgccaacaggaataggtttttgtatataattaagttaattttcctctggctgttatggccagtaactttagcttgttttgtgcttgctgctgtttacagaataaattggatcaccggtggaattgctatcgcaatggcttgtcttgtaggcttgatgtggctcagctacttcattgcttctttcagactgtttgcgcgtacgcgttccatgtggtcattcaatccagaaactaacattcttctcaacgtgccactccatggcactattctgaccagaccgcttctagaaagtgaactcgtaatcggagctgtgatccttcgtggacatcttcgtattgctggacaccatctaggacgctgtgacatcaaggacctgcctaaagaaatcactgttgctacatcacgaacgctttcttattacaaattgggagcttcgcagcgtgtagcaggtgactcaggttttgctgcatacagtcgctacaggattggcaactataaattaaacacagaccattccagtagcagtgacaatattgctttgcttgtacagtaa

SEQ ID NO: 64 - protein, 222 aa, Severe acute respiratory syndrome coronavirus 2
MADSNGTITVEELKKLLEQWNLVIGFLFLTWICLLQFAYANRNRFLYIIKLIFLWLLWPVTLACFVLAAVYRINWITGGIAIAMACLVGLMWLSYFIASFRLFARTRSMWSFNPETNILLNVPLHGTILTRPLLESELVIGAVILRGHLRIAGHHLGRCDIKDLPKEITVATSRTLSYYKLGASQRVAGDSGFAAYSRYRIGNYKLNTDHSSSSDNIALLVQ

SEQ ID NO: 65 - DNA, 1260 bp, Severe acute respiratory syndrome coronavirus 2
atgtctgataatggaccccaaaatcagcgaaatgcaccccgcattacgtttggtggaccctcagattcaactggcagtaaccagaatggagaacgcagtggggcgcgatcaaaacaacgtcggccccaaggtttacccaataatactgcgtcttggttcaccgctctcactcaacatggcaaggaagaccttaaattccctcgaggacaaggcgttccaattaacaccaatagcagtccagatgaccaaattggctactaccgaagagctaccagacgaattcgtggtggtgacggtaaaatgaaagatctcagtccaagatggtatttctactacctaggaactgggccagaagctggacttccctatggtgctaacaaagacggcatcatatgggttgcaactgagggagccttgaatacaccaaaagatcacattggcacccgcaatcctgctaacaatgctgcaatcgtgctacaacttcctcaaggaacaacattgccaaaaggcttctacgcagaagggagcagaggcggcagtcaagcctcttctcgttcctcatcacgtagtcgcaacagttcaagaaattcaactccaggcagcagtaggggaacttctcctgctagaatggctggcaatggcggtgatgctgctcttgctttgctgctgcttgacagattgaaccagcttgagagcaaaatgtctggtaaaggccaacaacaacaaggccaaactgtcactaagaaatctgctgctgaggcttctaagaagcctcggcaaaaacgtactgccactaaagcatacaatgtaacacaagctttcggcagacgtggtccagaacaaacccaaggaaattttggggaccaggaactaatcagacaaggaactgattacaaacattggccgcaaattgcacaatttgcccccagcgcttcagcgttcttcggaatgtcgcgcattggcatggaagtcacaccttcgggaacgtggttgacctacacaggtgccatcaaattggatgacaaagatccaaatttcaaagatcaagtcattttgctgaataagcatattgacgcatacaaaacattcccaccaacagagcctaaaaaggacaaaaagaagaaggctgatgaaactcaagccttaccgcagagacagaagaaacagcaaactgtgactcttcttcctgctgcagatttggatgatttctccaaacaattgcaacaatccatgagcagtgctgactcaactcaggcctaa

SEQ ID NO: 66 - protein, 419 aa, Severe acute respiratory syndrome coronavirus 2
MSDNGPQNQRNAPRITFGGPSDSTGSNQNGERSGARSKQRRPQGLPNNTASWFTALTQHGKEDLKFPRGQGVPINTNSSPDDQIGYYRRATRRIRGGDGKMKDLSPRWYFYYLGTGPEAGLPYGANKDGIIWVATEGALNTPKDHIGTRNPANNAAIVLQLPQGTTLPKGFYAEGSRGGSQASSRSSSRSRNSSRNSTPGSSRGTSPARMAGNGGDAALALLLLDRLNQLESKMSGKGQQQQGQTVTKKSAAEASKKPRQKRTATKAYNVTQAFGRRGPEQTQGNFGDQELIRQGTDYKHWPQIAQFAPSASAFFGMSRIGMEVTPSGTWLTYTGAIKLDDKDPNFKDQVILLNKHIDAYKTFPPTEPKKDKKKKADETQALPQRQKKQQTVTLLPAADLDDFSKQLQQSMSSADSTQA

SEQ ID NO: 67 - protein, 6 aa, Artificial Sequence
  Furin cleavage site
RRRRRR

SEQ ID NO: 68 - DNA, 1242 bp, Artificial Sequence
  WuhanS_FP12_L9GT60_pVax
ggatccgccaccatggactggacctggattctgttcctggtggccgccgccacaagggtgcacagcatgcagatctacgaaggaaaactgaccgctgagggactgaggttcggaattgtcgcaagccgcgcgaatcacgcactggtggataggctggtggaaggcgctatcgacgcaattgtccggcacggcgggagagaggaagacatcacactggtgagagtctgcggcagctgggagattcccgtggcagctggagaactggctcgaaaggaggacatcgatgccgtgatcgctattggggtcctgtgccgaggagcaactcccagcttcgactacatcgcctcagaagtgagcaaggggctggctgatctgtccctggagctgaggaaacctatcacttttggcgtgattactgccgacaccctggaacaggcaatcgaggcggccggcacctgccatggaaacaaaggctgggaagcagccctgtgcgctattgagatggcaaatctgttcaaatctctgcgaggaggctccggaggatctggagggagtggaggctcaggaggaggcgacaccatcacactgccatgccgccctgcaccacctccacattgtagctccaacatcaccggcctgattctgacaagacaggggggatatagtaacgataataccgtgattttcaggccctcaggaggggactggagggacatcgcacgatgccagattgctggaacagtggtctctactcagctgtttctgaacggcagtctggctgaggaagaggtggtcatccgatctgaagactggcgggataatgcaaagtcaatttgtgtgcagctgaacacaagcgtcgagatcaattgcactggcgcagggcactgtaacatttctcgggccaaatgggataataccctgaagcagatcgccagtaaactgagagagcagtacggcaataagacaatcatcttcaagccttctagtggaggcgacccagagttcgtgaaccatagctttaattgcgggggagagttcttttattgtgattccacacagctgttcgatagcacttggtttgattccaccggtgggagcggaagtggcggttccggatcattcattgaagaccttctctttaacaaggtgaccctcgccgatgcaggtttcattaagcaatatggtgattgcctgggagacatcgcggctcgtgatcttatttgtgcgcagaaattttaatga

SEQ ID NO: 69 - RNA, 1242 nt, Artificial Sequence
  WuhanS_FP12_L9GT60_pVax
ggauccgccaccauggacuggaccuggauucuguuccugguggccgccgccacaagggugcacagcaugcagaucuacgaaggaaaacugaccgcugagggacugagguucggaauugucgcaagccgcgcgaaucacgcacugguggauaggcugguggaaggcgcuaucgacgcaauuguccggcacggcgggagagaggaagacaucacacuggugagagucugcggcagcugggagauucccguggcagcuggagaacuggcucgaaaggaggacaucgaugccgugaucgcuauugggguccugugccgaggagcaacucccagcuucgacuacaucgccucagaagugagcaaggggcuggcugaucugucccuggagcugaggaaaccuaucacuuuuggcgugauuacugccgacacccuggaacaggcaaucgaggcggccggcaccugccauggaaacaaaggcugggaagcagcccugugcgcuauugagauggcaaaucuguucaaaucucugcgaggaggcuccggaggaucuggagggaguggaggcucaggaggaggcgacaccaucacacugccaugccgcccugcaccaccuccacauuguagcuccaacaucaccggccugauucugacaagacaggggggauauaguaacgauaauaccgugauuuucaggcccucaggaggggacuggagggacaucgcacgaugccagauugcuggaacaguggucucuacucagcuguuucugaacggcagucuggcugaggaagagguggucauccgaucugaagacuggcgggauaaugcaaagucaauuugugugcagcugaacacaagcgucgagaucaauugcacuggcgcagggcacuguaacauuucucgggccaaaugggauaauacccugaagcagaucgccaguaaacugagagagcaguacggcaauaagacaaucaucuucaagccuucuaguggaggcgacccagaguucgugaaccauagcuuuaauugcgggggagaguucuuuuauugugauuccacacagcuguucgauagcacuugguuugauuccaccggugggagcggaaguggcgguuccggaucauucauugaagaccuucucuuuaacaaggugacccucgccgaugcagguuucauuaagcaauauggugauugccugggagacaucgcggcucgugaucuuauuugugcgcagaaauuuuaauga

SEQ ID NO: 70 - protein, 408 aa, Artificial Sequence
  WuhanS_FP12_L9GT60_pVax
MDWTWILFLVAAATRVHSMQIYEGKLTAEGLRFGIVASRANHALVDRLVEGAIDAIVRHGGREEDITLVRVCGSWEIPVAAGELARKEDIDAVIAIGVLCRGATPSFDYIASEVSKGLADLSLELRKPITFGVITADTLEQAIEAAGTCHGNKGWEAALCAIEMANLFKSLRGGSGGSGGSGGSGGGDTITLPCRPAPPPHCSSNITGLILTRQGGYSNDNTVIFRPSGGDWRDIARCQIAGTVVSTQLFLNGSLAEEEVVIRSEDWRDNAKSICVQLNTSVEINCTGAGHCNISRAKWDNTLKQIASKLREQYGNKTIIFKPSSGGDPEFVNHSFNCGGEFFYCDSTQLFDSTWFDSTGGSGSGGSGSFIEDLLFNKVTLADAGFIKQYGDCLGDIAARDLICAQKF

SEQ ID NO: 71 - DNA, 1167 bp, Artificial Sequence
  WuhanS_FP_L9GT60_pVax
ggatccgccaccatggactggacctggattctgttcctggtggccgccgccacaagggtgcacagcatgcagatctacgaaggaaaactgaccgctgagggactgaggttcggaattgtcgcaagccgcgcgaatcacgcactggtggataggctggtggaaggcgctatcgacgcaattgtccggcacggcgggagagaggaagacatcacactggtgagagtctgcggcagctgggagattcccgtggcagctggagaactggctcgaaaggaggacatcgatgccgtgatcgctattggggtcctgtgccgaggagcaactcccagcttcgactacatcgcctcagaagtgagcaaggggctggctgatctgtccctggagctgaggaaacctatcacttttggcgtgattactgccgacaccctggaacaggcaatcgaggcggccggcacctgccatggaaacaaaggctgggaagcagccctgtgcgctattgagatggcaaatctgttcaaatctctgcgaggaggctccggaggatctggagggagtggaggctcaggaggaggcgacaccatcacactgccatgccgccctgcaccacctccacattgtagctccaacatcaccggcctgattctgacaagacaggggggatatagtaacgataataccgtgattttcaggccctcaggaggggactggagggacatcgcacgatgccagattgctggaacagtggtctctactcagctgtttctgaacggcagtctggctgaggaagaggtggtcatccgatctgaagactggcgggataatgcaaagtcaatttgtgtgcagctgaacacaagcgtcgagatcaattgcactggcgcagggcactgtaacatttctcgggccaaatgggataataccctgaagcagatcgccagtaaactgagagagcagtacggcaataagacaatcatcttcaagccttctagtggaggcgacccagagttcgtgaaccatagctttaattgcgggggagagttcttttattgtgattccacacagctgttcgatagcacttggtttgattccaccggtgggagcggaagtggcggttccggaccttcaaagagatctttcattgaagacctgcttttcaacaaggtctaatga

SEQ ID NO: 72 - RNA, 1167 nt, Artificial Sequence
  WuhanS_FP_L9GT60_pVax
ggauccgccaccauggacuggaccuggauucuguuccugguggccgccgccacaagggugcacagcaugcagaucuacgaaggaaaacugaccgcugagggacugagguucggaauugucgcaagccgcgcgaaucacgcacugguggauaggcugguggaaggcgcuaucgacgcaauuguccggcacggcgggagagaggaagacaucacacuggugagagucugcggcagcugggagauucccguggcagcuggagaacuggcucgaaaggaggacaucgaugccgugaucgcuauugggguccugugccgaggagcaacucccagcuucgacuacaucgccucagaagugagcaaggggcuggcugaucugucccuggagcugaggaaaccuaucacuuuuggcgugauuacugccgacacccuggaacaggcaaucgaggcggccggcaccugccauggaaacaaaggcugggaagcagcccugugcgcuauugagauggcaaaucuguucaaaucucugcgaggaggcuccggaggaucuggagggaguggaggcucaggaggaggcgacaccaucacacugccaugccgcccugcaccaccuccacauuguagcuccaacaucaccggccugauucugacaagacaggggggauauaguaacgauaauaccgugauuuucaggcccucaggaggggacuggagggacaucgcacgaugccagauugcuggaacaguggucucuacucagcuguuucugaacggcagucuggcugaggaagagguggucauccgaucugaagacuggcgggauaaugcaaagucaauuugugugcagcugaacacaagcgucgagaucaauugcacuggcgcagggcacuguaacauuucucgggccaaaugggauaauacccugaagcagaucgccaguaaacugagagagcaguacggcaauaagacaaucaucuucaagccuucuaguggaggcgacccagaguucgugaaccauagcuuuaauugcgggggagaguucuuuuauugugauuccacacagcuguucgauagcacuugguuugauuccaccggugggagcggaaguggcgguuccggaccuucaaagagaucuuucauugaagaccugcuuuucaacaaggucuaauga

SEQ ID NO: 73 - protein, 383 aa, Artificial Sequence
  WuhanS_FP_L9GT60_pVax
MDWTWILFLVAAATRVHSMQIYEGKLTAEGLRFGIVASRANHALVDRLVEGAIDAIVRHGGREEDITLVRVCGSWEIPVAAGELARKEDIDAVIAIGVLCRGATPSFDYIASEVSKGLADLSLELRKPITFGVITADTLEQAIEAAGTCHGNKGWEAALCAIEMANLFKSLRGGSGGSGGSGGSGGGDTITLPCRPAPPPHCSSNITGLILTRQGGYSNDNTVIFRPSGGDWRDIARCQIAGTVVSTQLFLNGSLAEEEVVIRSEDWRDNAKSICVQLNTSVEINCTGAGHCNISRAKWDNTLKQIASKLREQYGNKTIIFKPSSGGDPEFVNHSFNCGGEFFYCDSTQLFDSTWFDSTGGSGSGGSGPSKRSFIEDLLFNKV

SEQ ID NO: 74 - DNA, 1758 bp, Artificial Sequence
  WuhanS_RBD_gmax_180_pVax
ggatccgccaccatggactggacctggattctgttcctggtggccgccgccacaagggtgcacagcctctcaattgccccaacgttgatcaaccgggacaagccatacacgaaagaggaacttatggagatattgcggttggccattatagctgaactcgatgcaattaatctctatgaacaaatggcccgctatagcgaagacgaaaatgtgagaaagatcttgttggacgtcgctagggaagagaaagcacacgtaggagagttcatggctttgttgcttaacctcgaccctgagcaagtcacagagctgaagggcgggttcgaggaagttaaagaattgaccggtatagaagctcacattaatgacaacaagaaagaggaaagtaatgtagagtatttcgagaagctcagatctgccttgttggatggagtcaacaagggtcgcagcttgctcaaacatctgcccgttacaagaatagaagggcagtcttttcgagtagacatcatcaaatttgaggacggcgtccgagtggttaaacaagagtataagcctataccccttcttaagaagaagttctacgtcggcattcgagaactgaatgacgggacatatgatgtcagcattgctactaaagccggtgagctgctggttaaagacgaagaaagtcttgtgatccgggaaattttgtcaacggaaggcatcaagaaaatgaaattgtcatcctgggacaatccagaagaagccctgaatgatttgatgaatgcgctccaagaagctagcaatgctagtgctggccccttcggccttattatcaatccaaagcggtacgccaaactgctgaagatctatgaaaagtcaggtaagatgctcgtagaagtactcaaggaaatcttccggggtggaataatcgtaactcttaatatcgacgaaaacaaagtgattatcttcgctaatacgcccgccgttctggacgtggtggtgggtcaagacgttacgctccaggagcttggtccggaaggggatgatgtcgcattcctggtcagtgaagccattggtataagaatcaagaacccggaagctatagttgttctcgaaggcgggtctggtgggagcggtggtagtggtggttctggtggtggtgggtcaggtggcggctcaggcggcggcaatctgtgccctttcggtgaggtctttaatgcaacaagatttgcaagtgtttacgcctggaaccgtaagcgcattagcaactgcactgccgattactctgtgctgtacaacagcacaagcttttccacatttaaatgttacggggtttcccctaccaacctcagcgacctctgctttactaatgtttacgcagattccttcgttatccgaggcgatgaagtccggcagatagctcccggacagaccggcaaaatcgctgactacaactataaactgccgaacgacagcacagggtgtgtaattgcttggaacagcaataacctcgattcaaaggttggcggaaattacaattatctttaccgtctgttccggaaaagcaatctgaaaccctttgagagagacatcagcacggaaatttatcaagccggttcaacaccatgtaacggagttgaaggctttaattgctattttcccctgcaatcttacggatttcaacctacgaacggggtcggttaccaaccttaccgggtggtcgtgctgagcttcgaattgcttcatgccccagccaccgtgtgtgggccataatga

SEQ ID NO: 75 - RNA, 1758 nt, Artificial Sequence
  WuhanS_RBD_gmax_180_pVax
ggauccgccaccauggacuggaccuggauucuguuccugguggccgccgccacaagggugcacagccucucaauugccccaacguugaucaaccgggacaagccauacacgaaagaggaacuuauggagauauugcgguuggccauuauagcugaacucgaugcaauuaaucucuaugaacaaauggcccgcuauagcgaagacgaaaaugugagaaagaucuuguuggacgucgcuagggaagagaaagcacacguaggagaguucauggcuuuguugcuuaaccucgacccugagcaagucacagagcugaagggcggguucgaggaaguuaaagaauugaccgguauagaagcucacauuaaugacaacaagaaagaggaaaguaauguagaguauuucgagaagcucagaucugccuuguuggauggagucaacaagggucgcagcuugcucaaacaucugcccguuacaagaauagaagggcagucuuuucgaguagacaucaucaaauuugaggacggcguccgagugguuaaacaagaguauaagccuauaccccuucuuaagaagaaguucuacgucggcauucgagaacugaaugacgggacauaugaugucagcauugcuacuaaagccggugagcugcugguuaaagacgaagaaagucuugugauccgggaaauuuugucaacggaaggcaucaagaaaaugaaauugucauccugggacaauccagaagaagcccugaaugauuugaugaaugcgcuccaagaagcuagcaaugcuagugcuggccccuucggccuuauuaucaauccaaagcgguacgccaaacugcugaagaucuaugaaaagucagguaagaugcucguagaaguacucaaggaaaucuuccgggguggaauaaucguaacucuuaauaucgacgaaaacaaagugauuaucuucgcuaauacgcccgccguucuggacgugguggugggucaagacguuacgcuccaggagcuugguccggaaggggaugaugucgcauuccuggucagugaagccauugguauaagaaucaagaacccggaagcuauaguuguucucgaaggcgggucuggugggagcggugguaguggugguucuggugguggugggucagguggcggcucaggcggcggcaaucugugcccuuucggugaggucuuuaaugcaacaagauuugcaaguguuuacgccuggaaccguaagcgcauuagcaacugcacugccgauuacucugugcuguacaacagcacaagcuuuuccacauuuaaauguuacgggguuuccccuaccaaccucagcgaccucugcuuuacuaauguuuacgcagauuccuucguuauccgaggcgaugaaguccggcagauagcucccggacagaccggcaaaaucgcugacuacaacuauaaacugccgaacgacagcacaggguguguaauugcuuggaacagcaauaaccucgauucaaagguuggcggaaauuacaauuaucuuuaccgucuguuccggaaaagcaaucugaaacccuuugagagagacaucagcacggaaauuuaucaagccgguucaacaccauguaacggaguugaaggcuuuaauugcuauuuuccccugcaaucuuacggauuucaaccuacgaacggggucgguuaccaaccuuaccggguggucgugcugagcuucgaauugcuucaugccccagccaccgugugugggccauaauga

SEQ ID NO: 76 - protein, 580 aa, Artificial Sequence
  WuhanS_RBD_gmax_180_pVax
MDWTWILFLVAAATRVHSLSIAPTLINRDKPYTKEELMEILRLAIIAELDAINLYEQMARYSEDENVRKILLDVAREEKAHVGEFMALLLNLDPEQVTELKGGFEEVKELTGIEAHINDNKKEESNVEYFEKLRSALLDGVNKGRSLLKHLPVTRIEGQSFRVDIIKFEDGVRVVKQEYKPIPLLKKKFYVGIRELNDGTYDVSIATKAGELLVKDEESLVIREILSTEGIKKMKLSSWDNPEEALNDLMNALQEASNASAGPFGLIINPKRYAKLLKIYEKSGKMLVEVLKEIFRGGIIVTLNIDENKVIIFANTPAVLDVVVGQDVTLQELGPEGDDVAFLVSEAIGIRIKNPEAIVVLEGGSGGSGGSGGSGGGGSGGGSGGGNLCPFGEVFNATRFASVYAWNRKRISNCTADYSVLYNSTSFSTFKCYGVSPTNLSDLCFTNVYADSFVIRGDEVRQIAPGQTGKIADYNYKLPNDSTGCVIAWNSNNLDSKVGGNYNYLYRLFRKSNLKPFERDISTEIYQAGSTPCNGVEGFNCYFPLQSYGFQPTNGVGYQPYRVVVLSFELLHAPATVCGP

SEQ ID NO: 77 - DNA, 1161 bp, Artificial Sequence
  WuhanS_RBD_gmax_LS_pVax
ggatccgccaccatggactggacctggattctgttcctggtggccgccgccacaagggtgcacagcatgcagatctacgaaggaaaactgaccgctgagggactgaggttcggaattgtcgcaagccgcgcgaatcacgcactggtggataggctggtggaaggcgctatcgacgcaattgtccggcacggcgggagagaggaagacatcacactggtgagagtctgcggcagctgggagattcccgtggcagctggagaactggctcgaaaggaggacatcgatgccgtgatcgctattggggtcctgtgccgaggagcaactcccagcttcgactacatcgcctcagaagtgagcaaggggctggctgatctgtccctggagctgaggaaacctatcacttttggcgtgattactgccgacaccctggaacaggcaatcgaggcggccggcacctgccatggaaacaaaggctgggaagcagccctgtgcgctattgagatggcaaatctgttcaaatctctgcgaggaggctccggaggatctggagggagtggaggctcaggaggaggcaatctgtgccctttcggtgaggtctttaatgcaacaagatttgcaagtgtttacgcctggaaccgtaagcgcattagcaactgcactgccgattactctgtgctgtacaacagcacaagcttttccacatttaaatgttacggggtttcccctaccaacctcagcgacctctgctttactaatgtttacgcagattccttcgttatccgaggcgatgaagtccggcagatagctcccggacagaccggcaaaatcgctgactacaactataaactgccgaacgacagcacagggtgtgtaattgcttggaacagcaataacctcgattcaaaggttggcggaaattacaattatctttaccgtctgttccggaaaagcaatctgaaaccctttgagagagacatcagcacggaaatttatcaagccggttcaacaccatgtaacggagttgaaggctttaattgctattttcccctgcaatcttacggatttcaacctacgaacggggtcggttaccaaccttaccgggtggtcgtgctgagcttcgaattgcttcatgccccagccaccgtgtgtgggccataatga

SEQ ID NO: 78 - RNA, 1161 nt, Artificial Sequence
  WuhanS_RBD_gmax_LS_pVax
ggauccgccaccauggacuggaccuggauucuguuccugguggccgccgccacaagggugcacagcaugcagaucuacgaaggaaaacugaccgcugagggacugagguucggaauugucgcaagccgcgcgaaucacgcacugguggauaggcugguggaaggcgcuaucgacgcaauuguccggcacggcgggagagaggaagacaucacacuggugagagucugcggcagcugggagauucccguggcagcuggagaacuggcucgaaaggaggacaucgaugccgugaucgcuauugggguccugugccgaggagcaacucccagcuucgacuacaucgccucagaagugagcaaggggcuggcugaucugucccuggagcugaggaaaccuaucacuuuuggcgugauuacugccgacacccuggaacaggcaaucgaggcggccggcaccugccauggaaacaaaggcugggaagcagcccugugcgcuauugagauggcaaaucuguucaaaucucugcgaggaggcuccggaggaucuggagggaguggaggcucaggaggaggcaaucugugcccuuucggugaggucuuuaaugcaacaagauuugcaaguguuuacgccuggaaccguaagcgcauuagcaacugcacugccgauuacucugugcuguacaacagcacaagcuuuuccacauuuaaauguuacgggguuuccccuaccaaccucagcgaccucugcuuuacuaauguuuacgcagauuccuucguuauccgaggcgaugaaguccggcagauagcucccggacagaccggcaaaaucgcugacuacaacuauaaacugccgaacgacagcacaggguguguaauugcuuggaacagcaauaaccucgauucaaagguuggcggaaauuacaauuaucuuuaccgucuguuccggaaaagcaaucugaaacccuuugagagagacaucagcacggaaauuuaucaagccgguucaacaccauguaacggaguugaaggcuuuaauugcuauuuuccccugcaaucuuacggauuucaaccuacgaacggggucgguuaccaaccuuaccggguggucgugcugagcuucgaauugcuucaugccccagccaccgugugugggccauaauga

SEQ ID NO: 79 - protein, 381 aa, Artificial Sequence
  WuhanS_RBD_gmax_LS_pVax
MDWTWILFLVAAATRVHSMQIYEGKLTAEGLRFGIVASRANHALVDRLVEGAIDAIVRHGGREEDITLVRVCGSWEIPVAAGELARKEDIDAVIAIGVLCRGATPSFDYIASEVSKGLADLSLELRKPITFGVITADTLEQAIEAAGTCHGNKGWEAALCAIEMANLFKSLRGGSGGSGGSGGSGGGNLCPFGEVFNATRFASVYAWNRKRISNCTADYSVLYNSTSFSTFKCYGVSPTNLSDLCFTNVYADSFVIRGDEVRQIAPGQTGKIADYNYKLPNDSTGCVIAWNSNNLDSKVGGNYNYLYRLFRKSNLKPFERDISTEIYQAGSTPCNGVEGFNCYFPLQSYGFQPTNGVGYQPYRVVVLSFELLHAPATVCGP

SEQ ID NO: 80 - DNA, 864 bp, Artificial Sequence
  CoV2-RBD_7mer_pVax
ggatccgccaccatggactggacctggattctgttcctggtggccgccgccacaagggtgcacagcaatctctgtccattcggagaggttttcaacgcgacgagattcgcctcagtttatgcctggaaccgtaaacggatatcaaactgcgtggctgactactctgttttatacaactccgcctctttcagtaccttcaagtgttacggtgtcagccctaccaaattgaatgatctctgctttacaaatgtttacgcagattcttttgtcataaggggcgatgaggttcggcaaatcgcccccgggcagacaggcaaaattgcggactataattataagttgccagacgatttcacgggctgcgtcatcgcctggaacagtaataatctcgattcaaaagtgggtgggaactacaattatctctacaggttattccggaagtcaaatctgaagcccttcgaacgcgacatcagtacggagatttaccaggctggaagcactccgtgcaacggggtggaggggttcaactgttattttcctctgcagtcttatgggtttcagcccactaatggtgtgggataccagccgtacagagtcgtggtgctgtccttcgaacttctccacgctcccgccaccgtctgtggtcccgggggatctggcggatcagggggtagtggaggtagcggcggcgggaagaaacagggagacgctgacgtctgtggggaagtggcttacatccagagcgtggtgtctgattgccatgtaccaaccgcggagctcaggactcttttagagattcggaaactgtttctggagatccaaaagctgaaggtcgaactccagggcctgtcaaaagaatgataa

SEQ ID NO: 81 - RNA, 864 nt, Artificial Sequence
  CoV2-RBD_7mer_pVax
ggauccgccaccauggacuggaccuggauucuguuccugguggccgccgccacaagggugcacagcaaucucuguccauucggagagguuuucaacgcgacgagauucgccucaguuuaugccuggaaccguaaacggauaucaaacugcguggcugacuacucuguuuuauacaacuccgccucuuucaguaccuucaaguguuacggugucagcccuaccaaauugaaugaucucugcuuuacaaauguuuacgcagauucuuuugucauaaggggcgaugagguucggcaaaucgcccccgggcagacaggcaaaauugcggacuauaauuauaaguugccagacgauuucacgggcugcgucaucgccuggaacaguaauaaucucgauucaaaagugggugggaacuacaauuaucucuacagguuauuccggaagucaaaucugaagcccuucgaacgcgacaucaguacggagauuuaccaggcuggaagcacuccgugcaacgggguggagggguucaacuguuauuuuccucugcagucuuauggguuucagcccacuaauggugugggauaccagccguacagagucguggugcuguccuucgaacuucuccacgcucccgccaccgucuguggucccgggggaucuggcggaucaggggguaguggagguagcggcggcgggaagaaacagggagacgcugacgucuguggggaaguggcuuacauccagagcguggugucugauugccauguaccaaccgcggagcucaggacucuuuuagagauucggaaacuguuucuggagauccaaaagcugaaggucgaacuccagggccugucaaaagaaugauaa

SEQ ID NO: 82 - protein, 264 aa, Artificial Sequence
  CoV2-RBD_7mer_pVax
NLCPFGEVFNATRFASVYAWNRKRISNCVADYSVLYNSASFSTFKCYGVSPTKLNDLCFTNVYADSFVIRGDEVRQIAPGQTGKIADYNYKLPDDFTGCVIAWNSNNLDSKVGGNYNYLYRLFRKSNLKPFERDISTEIYQAGSTPCNGVEGFNCYFPLQSYGFQPTNGVGYQPYRVVVLSFELLHAPATVCGPGGSGGSGGSGGSGGGKKQGDADVCGEVAYIQSVVSDCHVPTAELRTLLEIRKLFLEIQKLKVELQGLSKE

SEQ ID NO: 83 - DNA, 954 bp, Artificial Sequence
  CoV2-RBD_gmax_14mer_pVax
ggatccgccaccatggactggacctggattctgttcctggtggccgccgccacaagggtgcacagcaatctgtgtcccttcggggaggttttcaatgctaccagatttgccagtgtgtatgcttggaatcggaagagaatctccaattgcacagcagattattcagttctctacaactctacatcttttagtacctttaagtgttacggggtgagtcccactaacctttcagatttatgtttcaccaatgtctacgctgactccttcgtgatccggggggatgaggtgagacagattgcacctggacaaactggcaaaatcgccgactacaattacaaacttccaaacgactctacagggtgtgtaatcgcttggaacagcaataatctggatagcaaagtaggcggcaattataattacctctacagactgtttaggaagtccaacctgaaaccatttgagagggacatcagcactgaaatctaccaggcggggagcaccccttgtaatggagtcgagggtttcaactgttacttcccactgcagagctacgggttccagcctaccaatggtgtcggttaccagccctatcgagttgtggtgttgtcattcgaactgttacatgcacctgcaacggtctgtggacccgggggttcagggggtagtggggggtccggtgggagcggtgggggcaagaaacaggggatgaatccgctcatcgccgccgcctctgtgatagctgctggcctggccgtgggcctggcatcaatcgggcccggggtgggccaaggcaccgccgccggccaggccgtcgagggtattgcaaggcagccggaggcagaaggcaaaattagagggaccctgttgttgtctttagcgttcatggaagccctcactatttacggactggttgtggccttagcccttctgtttgccaatcctttcgtgtaatga

SEQ ID NO: 84 - RNA, 954 nt, Artificial Sequence
  CoV2-RBD_gmax_14mer_pVax
ggauccgccaccauggacuggaccuggauucuguuccugguggccgccgccacaagggugcacagcaaucugugucccuucggggagguuuucaaugcuaccagauuugccaguguguaugcuuggaaucggaagagaaucuccaauugcacagcagauuauucaguucucuacaacucuacaucuuuuaguaccuuuaaguguuacggggugagucccacuaaccuuucagauuuauguuucaccaaugucuacgcugacuccuucgugauccggggggaugaggugagacagauugcaccuggacaaacuggcaaaaucgccgacuacaauuacaaacuuccaaacgacucuacaggguguguaaucgcuuggaacagcaauaaucuggauagcaaaguaggcggcaauuauaauuaccucuacagacuguuuaggaaguccaaccugaaaccauuugagagggacaucagcacugaaaucuaccaggcggggagcaccccuuguaauggagucgaggguuucaacuguuacuucccacugcagagcuacggguuccagccuaccaauggugucgguuaccagcccuaucgaguugugguguugucauucgaacuguuacaugcaccugcaacggucuguggacccggggguucaggggguagugggggguccggugggagcggugggggcaagaaacaggggaugaauccgcucaucgccgccgccucugugauagcugcuggccuggccgugggccuggcaucaaucgggcccggggugggccaaggcaccgccgccggccaggccgucgaggguauugcaaggcagccggaggcagaaggcaaaauuagagggacccuguuguugucuuuagcguucauggaagcccucacuauuuacggacugguuguggccuuagcccuucuguuugccaauccuuucguguaauga

SEQ ID NO: 85 - protein, 294 aa, Artificial Sequence
  CoV2-RBD_gmax_14mer_pVax
NLCPFGEVFNATRFASVYAWNRKRISNCTADYSVLYNSTSFSTFKCYGVSPTNLSDLCFTNVYADSFVIRGDEVRQIAPGQTGKIADYNYKLPNDSTGCVIAWNSNNLDSKVGGNYNYLYRLFRKSNLKPFERDISTEIYQAGSTPCNGVEGFNCYFPLQSYGFQPTNGVGYQPYRVVVLSFELLHAPATVCGPGGSGGSGGSGGSGGGKKQGMNPLIAAASVIAAGLAVGLASIGPGVGQGTAAGQAVEGIARQPEAEGKIRGTLLLSLAFMEALTIYGLVVALALLFANPFV

SEQ ID NO: 86 - DNA, 1200 bp, Artificial Sequence
  CoV2-RBD_gmax_24mer_pVax
ggatccgccaccatggactggacctggattctgttcctggtggccgccgccacaagggtgcacagcaacctgtgccccttcggggaagtttttaatgccactcggtttgcctccgtttacgcctggaacaggaagcgcatttccaactgcaccgccgactatagcgtcctttataacagcacatccttttcaactttcaagtgttacggggtttcccctacaaatctctctgacctgtgttttacaaatgtgtatgcagactctttcgtgattaggggagatgaggtgcgccagatcgcccctggacagaccggaaaaatcgccgattataattataagcttcccaacgactccacaggctgtgtaattgcctggaattctaataacctggactctaaagtgggcggtaactacaattatctgtatagactcttcagaaagtctaacctcaaaccatttgaacgggacatctcaaccgagatctaccaagccgggtccaccccctgtaacggcgtggaaggcttcaactgttatttccccctccagtcctatggcttccaacccacaaatggagtcggctaccagccttacagggtggttgtgctgtcatttgagctcctccacgctcctgccactgtatgtgggccaggcgggtccggaggttcaggcggtagcggcggctcaggtggaggaggactgtctaaagatattataaaactgctgaacgaacaagtgaacaaggagatgcagagcagcaacctttacatgtctatgagcagttggtgttacactcactctctcgacggcgccggcctgttcctgtttgatcacgccgcggaggagtatgaacatgctaaaaagcttatcatcttcctcaacgaaaataacgtgccagtgcagttgacctctatttccgctcccgaacataagttcgaaggcctcacacagatctttcagaaggcttacgagcatgaacaacacatttcagagagcatcaacaacatcgtggaccatgcgatcaagtctaaggaccacgcgacttttaacttcctccagtggtatgtcgccgaacagcatgaggaggaagtgttgttcaaagacatcctggacaagattgaacttattggcaacgaaaaccacggcctctacctggccgatcagtacgtgaaaggtatcgcgaagtcacgaaagagttaatga

SEQ ID NO: 87 - RNA, 1200 nt, Artificial Sequence
  CoV2-RBD_gmax_24mer_pVax
ggauccgccaccauggacuggaccuggauucuguuccugguggccgccgccacaagggugcacagcaaccugugccccuucggggaaguuuuuaaugccacucgguuugccuccguuuacgccuggaacaggaagcgcauuuccaacugcaccgccgacuauagcguccuuuauaacagcacauccuuuucaacuuucaaguguuacgggguuuccccuacaaaucucucugaccuguguuuuacaaauguguaugcagacucuuucgugauuaggggagaugaggugcgccagaucgccccuggacagaccggaaaaaucgccgauuauaauuauaagcuucccaacgacuccacaggcuguguaauugccuggaauucuaauaaccuggacucuaaagugggcgguaacuacaauuaucuguauagacucuucagaaagucuaaccucaaaccauuugaacgggacaucucaaccgagaucuaccaagccggguccacccccuguaacggcguggaaggcuucaacuguuauuucccccuccaguccuauggcuuccaacccacaaauggagucggcuaccagccuuacagggugguugugcugucauuugagcuccuccacgcuccugccacuguaugugggccaggcggguccggagguucaggcgguagcggcggcucagguggaggaggacugucuaaagauauuauaaaacugcugaacgaacaagugaacaaggagaugcagagcagcaaccuuuacaugucuaugagcaguugguguuacacucacucucucgacggcgccggccuguuccuguuugaucacgccgcggaggaguaugaacaugcuaaaaagcuuaucaucuuccucaacgaaaauaacgugccagugcaguugaccucuauuuccgcucccgaacauaaguucgaaggccucacacagaucuuucagaaggcuuacgagcaugaacaacacauuucagagagcaucaacaacaucguggaccaugcgaucaagucuaaggaccacgcgacuuuuaacuuccuccagugguaugucgccgaacagcaugaggaggaaguguuguucaaagacauccuggacaagauugaacuuauuggcaacgaaaaccacggccucuaccuggccgaucaguacgugaaagguaucgcgaagucacgaaagaguuaauga

SEQ ID NO: 88 - protein, 376 aa, Artificial Sequence
  CoV2-RBD_gmax_24mer_pVax
NLCPFGEVFNATRFASVYAWNRKRISNCTADYSVLYNSTSFSTFKCYGVSPTNLSDLCFTNVYADSFVIRGDEVRQIAPGQTGKIADYNYKLPNDSTGCVIAWNSNNLDSKVGGNYNYLYRLFRKSNLKPFERDISTEIYQAGSTPCNGVEGFNCYFPLQSYGFQPTNGVGYQPYRVVVLSFELLHAPATVCGPGGSGGSGGSGGSGGGGLSKDIIKLLNEQVNKEMQSSNLYMSMSSWCYTHSLDGAGLFLFDHAAEEYEHAKKLIIFLNENNVPVQLTSISAPEHKFEGLTQIFQKAYEHEQHISESINNIVDHAIKSKDHATFNFLQWYVAEQHEEEVLFKDILDKIELIGNENHGLYLADQYVKGIAKSRKS

SEQ ID NO: 89 - DNA, 864 bp, Artificial Sequence
  CoV2-RBD_gmax_7mer_pVax
ggatccgccaccatggactggacctggattctgttcctggtggccgccgccacaagggtgcacagcaatctttgtccattcggggaagtgtttaacgccactaggttcgctagtgtgtacgcctggaatcggaagcggatttcaaattgtaccgccgattattctgtcctttacaacagtaccagcttttccacttttaaatgctacggagtatctcctacaaacttgagtgacctgtgttttacgaacgtctacgctgactctttcgttattaggggagacgaagttagacaaatcgctccaggccagactggcaaaatagccgactataactataaactcccaaacgattccacaggctgcgttattgcctggaacagcaataacctggactctaaagtcggaggtaactataactacttgtacaggctcttccgcaagagcaaccttaagccatttgagcgagatatctccaccgagatttatcaggcagggagcaccccatgcaacggagtggaggggtttaattgctattttccactgcagtcctatggctttcaaccaacaaacggagtaggctaccaaccgtatcgcgttgtcgtcctgagtttcgaactgttgcacgcccctgcgaccgtatgtggccccggcggctcaggggggagtggtgggagcgggggctctgggggggggaaaaaacagggggacgccgatgtttgcggcgaggtggcctatatacagtcagtggtctccgactgtcatgtaccaactgccgaactcaggactcttctggagataaggaagttgttcctggagatacagaagctcaaggtcgagttacagggtctctcaaaggaatgatga

SEQ ID NO: 90 - RNA, 864 nt, Artificial Sequence
  CoV2-RBD_gmax_7mer_pVax
ggauccgccaccauggacuggaccuggauucuguuccugguggccgccgccacaagggugcacagcaaucuuuguccauucggggaaguguuuaacgccacuagguucgcuaguguguacgccuggaaucggaagcggauuucaaauuguaccgccgauuauucuguccuuuacaacaguaccagcuuuuccacuuuuaaaugcuacggaguaucuccuacaaacuugagugaccuguguuuuacgaacgucuacgcugacucuuucguuauuaggggagacgaaguuagacaaaucgcuccaggccagacuggcaaaauagccgacuauaacuauaaacucccaaacgauuccacaggcugcguuauugccuggaacagcaauaaccuggacucuaaagucggagguaacuauaacuacuuguacaggcucuuccgcaagagcaaccuuaagccauuugagcgagauaucuccaccgagauuuaucaggcagggagcaccccaugcaacggaguggagggguuuaauugcuauuuuccacugcaguccuauggcuuucaaccaacaaacggaguaggcuaccaaccguaucgcguugucguccugaguuucgaacuguugcacgccccugcgaccguauguggccccggcggcucaggggggaguggugggagcgggggcucugggggggggaaaaaacagggggacgccgauguuugcggcgagguggccuauauacagucaguggucuccgacugucauguaccaacugccgaacucaggacucuucuggagauaaggaaguuguuccuggagauacagaagcucaaggucgaguuacagggucucucaaaggaaugauga

SEQ ID NO: 91 - protein, 264 aa, Artificial Sequence
  CoV2-RBD_gmax_7mer_pVax
NLCPFGEVFNATRFASVYAWNRKRISNCTADYSVLYNSTSFSTFKCYGVSPTNLSDLCFTNVYADSFVIRGDEVRQIAPGQTGKIADYNYKLPNDSTGCVIAWNSNNLDSKVGGNYNYLYRLFRKSNLKPFERDISTEIYQAGSTPCNGVEGFNCYFPLQSYGFQPTNGVGYQPYRVVVLSFELLHAPATVCGPGGSGGSGGSGGSGGGKKQGDADVCGEVAYIQSVVSDCHVPTAELRTLLEIRKLFLEIQKLKVELQGLSKE

SEQ ID NO: 92 - DNA, 3840 bp, Artificial Sequence
  WuhanS_SolTri_FS1_pVax
ggatccgccaccatggactggacctggattctgttcctggtggccgccgccacaagggtgcacagcatgtttgttttcctcgtcctcttgcccctcgtctctagtcaatgtgttaatttgaccacacgaacccaactgccacctgcctacaccaacagttttaccagaggagtttattaccccgacaaagtattcaggtcatcagtgctgcatagtacccaagacttgtttctccccttctttagtaacgttacatggttccacgccattcacgtgagtgggacaaatggaacaaaacgcttcgacaaccctgtgctccccttcaacgatggtgtatactttgctagtaccgagaagagcggaattatccgcgggtggatctttggaacaacactggacagcaaaacccaaagcctgcttatcgttaacaatgctactaacgttgtgatcaaagtgtgtgaattccaattttgtaatgatccgtttctcggagtttactaccacaagaacaacaaaagttggatggaaagcgaattccgggtgtactcctcagcaaataattgtacctttgagtacgtgagtcaaccctttctcatggacctggaaggaaaacaaggcaatttcaagaacctgcgggagtttgtgttcaagaatattgatggctattttaaaatttattctaagcatactccaatcaacctggtaagggacctgccccaaggcttttcagccctcgaaccgcttgtagatttgcctatcgggataaacattacgcgatttcaaacgctgttggcgctccaccggagctacttgactcctggcgatagcagctccggttggaccgctggagcggccgcttattacgtcggctatctgcaacccaggacgttcctgctcaagtataatgagaacgggacgattacagatgcagtggattgtgcgcttgatcctctctctgaaaccaagtgcactctcaagtctttcacggtggagaaaggcatttatcaaactagtaactttcgagtacagcctactgagagtatcgttaggttcccaaacattacgaacctctgtccctttggagaagtattcaatgctactcgctttgcaagcgtttatgcctggaatcgcaaacgcatcagcaattgcgtcgccgattattctgtcctttataatagcgcatcattttcaacatttaagtgttatggggtgagtccgactaagctcaatgatttgtgcttcacaaacgtctacgcggacagctttgtgataaggggcgacgaagttcgccaaatcgctcccggccaaactgggaaaatcgcggattacaactataaattgcccgatgacttcaccggctgtgtcattgcctggaactctaataacctcgatagcaaggtgggcgggaactataattatttgtaccgcctgtttcgaaagtccaatctcaaaccctttgagcgggacatttccactgagatctatcaggcagggagtacaccttgtaacggcgtggaaggctttaactgttattttcccctgcaaagttacggttttcaacctaccaacggagttggctatcaaccttatcgagtcgtcgtgctgagttttgagttgctgcatgccccagccaccgtctgtggacctaagaaatccaccaacctcgtgaagaacaagtgcgtcaattttaattttaacggcctgactgggaccggtgtcctcaccgaatctaataagaagttcctgccatttcaacaattcggacgggacatcgctggaacgacagatgctgtccgtgatcctcagacactggagattctggacatcactccttgcagctttggcggagtctctgttattactcccggaactaacacttctaaccaagttgctgtcctctatcaggacgtgaactgcactgaagtgcccgtggcaatccatgcaggccaactgacccccacttggagagtctacagcacggggagcaatgtcttccaaacaagggccggatgccttattggagcggagcacgttaataactcatacgagtgtgatataccaattggagcaggaatttgtgcttcctaccagacccaaactaacagtcccaggcgggctaggagtgtcgctagccagagcatcatcgcgtacacaatgtctctcggcgcagaaaactcagtcgcctatagcaacaactcaattgccattcccaccaacttcacaatttccgtaaccactgaaattctgcctgttagcatgacaaagacatcagttgattgtacaatgtacatatgtggagacagcaccgaatgcagcaaccttttgcttcaatatggctccttttgtacccaactcaacagggcactcactgggatagcagtcgaacaagataagaacacccaagaggtgtttgcacaagtcaaacaaatctataaaacgccgcccataaaagactttggcggattcaatttcagccagatcttgcctgacccatccaagccttcaaagaggagctttattgaggatcttctcttcaataaagtgacactggcggacgccggttttatcaagcaatatggtgattgtctcggtgacatagcagctagagatctgatttgcgctcagaaatttaatggccttactgtgcttcccccactgctgaccgatgaaatgattgcacaatatacaagcgcccttttggccgggactattacttccgggtggaccttcggcgccggcgccgctctgcaaattcctttcgcaatgcagatggcctaccggttcaatggcataggtgtcactcagaacgttctttatgagaatcagaaactcatcgcgaaccagtttaattcagcgatcggcaagattcaggactccttgtcctcaactgcgtcagctttgggaaaacttcaagacgtcgtgaaccagaatgctcaggcgctcaataccctggtgaaacaacttagcagtaactttggggctatttctagcggtccaaacgatatactgtcccgactcccgaaagtcgaggccgaagtccaaattgatcgtcttattacagggagactccaatctcttcaaacatatgtcactcaacagctcattagggctgcggagatccgggcttccgcaaatcttgccgcgacaaagatgagtgaatgcgtcttgggacaatctaagagggtggacttttgtggaaaaggttaccatctcatgtccttccctcagtcagcgccccacggagtcgttttcctgcacgtaacgtatgtcccggctcaagagaagaacttcactactgcaccagcgatttgccatgacggtaaagcccattttccccgcgagggcgtatttgtgtccaacggtacccactggttcgtaacccaacggaatttctatgagccccaaatcattacaacagataatacagatgtttccgggaattgcgacgttgttattggcatcgttaacaacaccgtttacgatcccttgcaaccggaactggactcctttaaagaagaactcgacaagtattttaagaaccacacatcaccagatgtcgatcttggcgacatttccggcattaacgcttcagttgtaaatattcagaaagagatagatcgcctgaatgaggtggctaagaacctgaacgaatctctcattgatctccaagagctgggaaagtacgaacaatacatcaaatggccttctgggcgtcgccgaagacgacgagggtccggcggctcagggagcggctatatccctgaggcgcctcgggacggacaagcttatgtgaggaaagatggagaatgggtattgctgtcaaccttcctgggataatga

SEQ ID NO: 93 - RNA, 3840 nt, Artificial Sequence
  WuhanS_SolTri_FS1_pVax
ggauccgccaccauggacuggaccuggauucuguuccugguggccgccgccacaagggugcacagcauguuuguuuuccucguccucuugccccucgucucuagucaauguguuaauuugaccacacgaacccaacugccaccugccuacaccaacaguuuuaccagaggaguuuauuaccccgacaaaguauucaggucaucagugcugcauaguacccaagacuuguuucuccccuucuuuaguaacguuacaugguuccacgccauucacgugagugggacaaauggaacaaaacgcuucgacaacccugugcuccccuucaacgaugguguauacuuugcuaguaccgagaagagcggaauuauccgcggguggaucuuuggaacaacacuggacagcaaaacccaaagccugcuuaucguuaacaaugcuacuaacguugugaucaaagugugugaauuccaauuuuguaaugauccguuucucggaguuuacuaccacaagaacaacaaaaguuggauggaaagcgaauuccggguguacuccucagcaaauaauuguaccuuugaguacgugagucaacccuuucucauggaccuggaaggaaaacaaggcaauuucaagaaccugcgggaguuuguguucaagaauauugauggcuauuuuaaaauuuauucuaagcauacuccaaucaaccugguaagggaccugccccaaggcuuuucagcccucgaaccgcuuguagauuugccuaucgggauaaacauuacgcgauuucaaacgcuguuggcgcuccaccggagcuacuugacuccuggcgauagcagcuccgguuggaccgcuggagcggccgcuuauuacgucggcuaucugcaacccaggacguuccugcucaaguauaaugagaacgggacgauuacagaugcaguggauugugcgcuugauccucucucugaaaccaagugcacucucaagucuuucacgguggagaaaggcauuuaucaaacuaguaacuuucgaguacagccuacugagaguaucguuagguucccaaacauuacgaaccucugucccuuuggagaaguauucaaugcuacucgcuuugcaagcguuuaugccuggaaucgcaaacgcaucagcaauugcgucgccgauuauucuguccuuuauaauagcgcaucauuuucaacauuuaaguguuauggggugaguccgacuaagcucaaugauuugugcuucacaaacgucuacgcggacagcuuugugauaaggggcgacgaaguucgccaaaucgcucccggccaaacugggaaaaucgcggauuacaacuauaaauugcccgaugacuucaccggcugugucauugccuggaacucuaauaaccucgauagcaaggugggcgggaacuauaauuauuuguaccgccuguuucgaaaguccaaucucaaacccuuugagcgggacauuuccacugagaucuaucaggcagggaguacaccuuguaacggcguggaaggcuuuaacuguuauuuuccccugcaaaguuacgguuuucaaccuaccaacggaguuggcuaucaaccuuaucgagucgucgugcugaguuuugaguugcugcaugccccagccaccgucuguggaccuaagaaauccaccaaccucgugaagaacaagugcgucaauuuuaauuuuaacggccugacugggaccgguguccucaccgaaucuaauaagaaguuccugccauuucaacaauucggacgggacaucgcuggaacgacagaugcuguccgugauccucagacacuggagauucuggacaucacuccuugcagcuuuggcggagucucuguuauuacucccggaacuaacacuucuaaccaaguugcuguccucuaucaggacgugaacugcacugaagugcccguggcaauccaugcaggccaacugacccccacuuggagagucuacagcacggggagcaaugucuuccaaacaagggccggaugccuuauuggagcggagcacguuaauaacucauacgagugugauauaccaauuggagcaggaauuugugcuuccuaccagacccaaacuaacagucccaggcgggcuaggagugucgcuagccagagcaucaucgcguacacaaugucucucggcgcagaaaacucagucgccuauagcaacaacucaauugccauucccaccaacuucacaauuuccguaaccacugaaauucugccuguuagcaugacaaagacaucaguugauuguacaauguacauauguggagacagcaccgaaugcagcaaccuuuugcuucaauauggcuccuuuuguacccaacucaacagggcacucacugggauagcagucgaacaagauaagaacacccaagagguguuugcacaagucaaacaaaucuauaaaacgccgcccauaaaagacuuuggcggauucaauuucagccagaucuugccugacccauccaagccuucaaagaggagcuuuauugaggaucuucucuucaauaaagugacacuggcggacgccgguuuuaucaagcaauauggugauugucucggugacauagcagcuagagaucugauuugcgcucagaaauuuaauggccuuacugugcuucccccacugcugaccgaugaaaugauugcacaauauacaagcgcccuuuuggccgggacuauuacuuccggguggaccuucggcgccggcgccgcucugcaaauuccuuucgcaaugcagauggccuaccgguucaauggcauaggugucacucagaacguucuuuaugagaaucagaaacucaucgcgaaccaguuuaauucagcgaucggcaagauucaggacuccuuguccucaacugcgucagcuuugggaaaacuucaagacgucgugaaccagaaugcucaggcgcucaauacccuggugaaacaacuuagcaguaacuuuggggcuauuucuagcgguccaaacgauauacugucccgacucccgaaagucgaggccgaaguccaaauugaucgucuuauuacagggagacuccaaucucuucaaacauaugucacucaacagcucauuagggcugcggagauccgggcuuccgcaaaucuugccgcgacaaagaugagugaaugcgucuugggacaaucuaagaggguggacuuuuguggaaaagguuaccaucucauguccuucccucagucagcgccccacggagucguuuuccugcacguaacguaugucccggcucaagagaagaacuucacuacugcaccagcgauuugccaugacgguaaagcccauuuuccccgcgagggcguauuuguguccaacgguacccacugguucguaacccaacggaauuucuaugagccccaaaucauuacaacagauaauacagauguuuccgggaauugcgacguuguuauuggcaucguuaacaacaccguuuacgaucccuugcaaccggaacuggacuccuuuaaagaagaacucgacaaguauuuuaagaaccacacaucaccagaugucgaucuuggcgacauuuccggcauuaacgcuucaguuguaaauauucagaaagagauagaucgccugaaugagguggcuaagaaccugaacgaaucucucauugaucuccaagagcugggaaaguacgaacaauacaucaaauggccuucugggcgucgccgaagacgacgaggguccggcggcucagggagcggcuauaucccugaggcgccucgggacggacaagcuuaugugaggaaagauggagaauggguauugcugucaaccuuccugggauaauga

SEQ ID NO: 94 - protein, 1274 aa, Artificial Sequence
  WuhanS_SolTri_FS1_pVax
MDWTWILFLVAAATRVHSMFVFLVLLPLVSSQCVNLTTRTQLPPAYTNSFTRGVYYPDKVFRSSVLHSTQDLFLPFFSNVTWFHAIHVSGTNGTKRFDNPVLPFNDGVYFASTEKSGIIRGWIFGTTLDSKTQSLLIVNNATNVVIKVCEFQFCNDPFLGVYYHKNNKSWMESEFRVYSSANNCTFEYVSQPFLMDLEGKQGNFKNLREFVFKNIDGYFKIYSKHTPINLVRDLPQGFSALEPLVDLPIGINITRFQTLLALHRSYLTPGDSSSGWTAGAAAYYVGYLQPRTFLLKYNENGTITDAVDCALDPLSETKCTLKSFTVEKGIYQTSNFRVQPTESIVRFPNITNLCPFGEVFNATRFASVYAWNRKRISNCVADYSVLYNSASFSTFKCYGVSPTKLNDLCFTNVYADSFVIRGDEVRQIAPGQTGKIADYNYKLPDDFTGCVIAWNSNNLDSKVGGNYNYLYRLFRKSNLKPFERDISTEIYQAGSTPCNGVEGFNCYFPLQSYGFQPTNGVGYQPYRVVVLSFELLHAPATVCGPKKSTNLVKNKCVNFNFNGLTGTGVLTESNKKFLPFQQFGRDIAGTTDAVRDPQTLEILDITPCSFGGVSVITPGTNTSNQVAVLYQDVNCTEVPVAIHAGQLTPTWRVYSTGSNVFQTRAGCLIGAEHVNNSYECDIPIGAGICASYQTQTNSPRRARSVASQSIIAYTMSLGAENSVAYSNNSIAIPTNFTISVTTEILPVSMTKTSVDCTMYICGDSTECSNLLLQYGSFCTQLNRALTGIAVEQDKNTQEVFAQVKQIYKTPPIKDFGGFNFSQILPDPSKPSKRSFIEDLLFNKVTLADAGFIKQYGDCLGDIAARDLICAQKFNGLTVLPPLLTDEMIAQYTSALLAGTITSGWTFGAGAALQIPFAMQMAYRFNGIGVTQNVLYENQKLIANQFNSAIGKIQDSLSSTASALGKLQDVVNQNAQALNTLVKQLSSNFGAISSGPNDILSRLPKVEAEVQIDRLITGRLQSLQTYVTQQLIRAAEIRASANLAATKMSECVLGQSKRVDFCGKGYHLMSFPQSAPHGVVFLHVTYVPAQEKNFTTAPAICHDGKAHFPREGVFVSNGTHWFVTQRNFYEPQIITTDNTDVSGNCDVVIGIVNNTVYDPLQPELDSFKEELDKYFKNHTSPDVDLGDISGINASVVNIQKEIDRLNEVAKNLNESLIDLQELGKYEQYIKWPSGRRRRRRGSGGSGSGYIPEAPRDGQAYVRKDGEWVLLSTFLG

SEQ ID NO: 95 - DNA, 3810 bp, Artificial Sequence
  WuS_IgE_StrepHis_pVax
gccaccatggactggacctggatactctttctcgtagcagcagccacacgagtgcattcaagccaatgcgtgaatctgactacaaggactcagctgccccctgcatacacgaacagtttcacccgcggtgtatattatccggacaaagtattcaggtctagtgtgctgcactcaacccaggatttgtttctgcccttcttctctaacgtgacatggttccacgccatccatgtgtcaggtacgaacggtaccaagagatttgataacccggtactgccatttaatgacggcgtctattttgcttccactgagaagagcaacatcataagaggctggatctttggaactactctggacagcaaaacccagagcttgctgatcgtgaacaacgcgacaaatgtagtgatcaaagtatgtgagtttcaattctgtaacgatcccttccttggggtttattaccataagaataataagagttggatggagtccgaatttagagtttactcctcagctaataactgtacgttcgagtatgtctcccaaccttttcttatggatctcgaagggaaacagggtaactttaagaatcttcgagaatttgtgttcaagaacatcgacggttattttaagatctacagtaagcatactcccataaatctggttagagatctcccgcaaggattttccgcactggagccccttgtagaccttcccattggaataaacataacacgtttccagacactcctcgctctgcataggtcatatctcaccccgggcgattcttccagcggatggaccgctggagctgctgcttactacgtaggatacctgcaaccccggacatttctgctcaagtataacgaaaatgggactattacggacgctgtggactgtgctcttgacccacttagcgagacaaaatgcacgctgaaaagttttaccgtggagaaggggatctatcaaacgagcaattttagggttcagcctaccgaatcaatcgtcagatttcccaatatcactaacctgtgccctttcggggaagttttcaacgcaacccggtttgcgagcgtatacgcttggaatcgcaaaaggataagcaattgcgttgccgattactccgttctttacaattcagcatcattttctacttttaaatgctacggcgtgtctcccacaaaactgaatgacctgtgttttacgaacgtgtatgcagacagctttgtgattaggggtgatgaggttagacaaatcgcaccaggtcagaccggtaagatcgctgattacaactacaaactgcccgatgacttcacaggatgcgtgattgcctggaattccaacaatctggattctaaggttggcggcaattacaattacctgtataggttgtttcggaagtcaaacctgaaacccttcgaaagagacatttctaccgagatttatcaagcgggttcaactccttgtaatggagttgaaggcttcaattgttactttccccttcaatcatacggattccaaccaaccaatggggtcggataccagccatatagggttgttgtcctgtcattcgaacttctccacgcaccagccaccgtatgtggacccaagaagtctactaatctggtgaagaacaaatgcgtcaatttcaactttaatgggttgaccggcactggggtgctgactgaatccaacaagaagtttctgccgttccaacaattcggacgcgatatcgctgatacaaccgatgccgttagagatccccaaacattggagattctggatattacgccttgttcattcggtggtgtttccgtgattacccctggcaccaatacgagtaaccaagtggcggtgctgtatcaagatgtgaactgtactgaagtgccggtggctatacatgccgaccaactcacaccaacatggagagtatatagcacgggttccaatgtgtttcaaactagggctggctgtttgattggcgctgaacatgttaataattcctatgaatgcgatattcccatcggtgccgggatttgcgcaagttatcaaacgcaaactaactcccccgggtcagcatcctctgtcgcttcccaatcaatcatcgcctataccatgagtcttggggcagaaaattccgttgcttattctaacaattccattgcaattcctacgaacttcaccatctcagttactacagaaatacttcccgtgtcaatgacgaagacatccgtagattgcacaatgtatatatgtggggactcaactgaatgctcaaacctgctcctgcaatacggatcattttgcacccaactgaacagagcattgaccggtatagccgtggagcaagataagaacactcaagaagtattcgcccaggtcaaacaaatctataaaactccgcctataaaagattttggcggctttaacttttcccaaatactgcctgacccaagtaagccctcaaaacgtagctttatagaggacctcttgtttaataaggtgacactcgctgacgctggattcattaagcaatatggtgactgcttgggagatattgccgcccgcgatctcatttgtgcacaaaagttcaacggcctcacagtcctgccccctctgctgacggatgaaatgatcgctcaatacacctcagctctcctggcaggcaccataacaagcgggtggacatttggtgccggggcagcactgcaaatcccattcgcaatgcaaatggcttataggttcaatgggatcggcgtaactcaaaatgtcctctacgagaaccagaaactcatagctaaccaattcaattctgcaatcgggaaaatccaggactccctgagctcaacggccagcgcactgggcaagctccaagatgtggtcaaccaaaacgcacaagcactgaatactcttgtgaaacaactcagctccaatttcggggcaatatcaagtgtcctcaatgatattcttagcaggcttgatccacccgaagccgaggtgcagatcgacaggctcataacaggcaggctccagtcccttcaaacgtatgtaactcagcaactgattcgggctgccgagattcgagcttcagctaatttggcagctacgaagatgagcgaatgcgtcctgggacagtctaaaagagtagacttttgcggcaaagggtatcatctgatgagcttcccacaaagtgctccacatggcgtggttttcctgcatgtcacttatgttcccgcacaagagaagaacttcactaccgcaccagcgatctgtcacgatggtaaagcacatttcccgcgggaaggcgtattcgtatctaacggcacccactggttcgttactcaacgcaacttttatgaaccacaaatcattacaaccgataacacttttgtttcaggcaattgcgatgttgtcatcggcattgtgaataacactgtgtacgatccacttcaaccagaattggacagctttaaagaggagcttgataagtatttcaagaatcatacctctcccgacgtggacctcggggacatctctggaataaatgctagcgtcgttaatatacagaaagagattgatcgtctgaacgaagtggctaagaatctgaatgaaagccttatcgatctgcaagaactggggaagtacgaacagggatacataccggaagccccacgcgacggtcaggcttatgttaggaaggatggagaatgggttttgctctccacgtttctcgggcttgaagttttgttccaaggaccctggtcacacccccaatttgagaaacaccatcaccaccatcaccaccactgataa

SEQ ID NO: 96 - RNA, 3810 nt, Artificial Sequence
  WuS_IgE_StrepHis_pVax
gccaccauggacuggaccuggauacucuuucucguagcagcagccacacgagugcauucaagccaaugcgugaaucugacuacaaggacucagcugcccccugcauacacgaacaguuucacccgcgguguauauuauccggacaaaguauucaggucuagugugcugcacucaacccaggauuuguuucugcccuucuucucuaacgugacaugguuccacgccauccaugugucagguacgaacgguaccaagagauuugauaacccgguacugccauuuaaugacggcgucuauuuugcuuccacugagaagagcaacaucauaagaggcuggaucuuuggaacuacucuggacagcaaaacccagagcuugcugaucgugaacaacgcgacaaauguagugaucaaaguaugugaguuucaauucuguaacgaucccuuccuugggguuuauuaccauaagaauaauaagaguuggauggaguccgaauuuagaguuuacuccucagcuaauaacuguacguucgaguaugucucccaaccuuuucuuauggaucucgaagggaaacaggguaacuuuaagaaucuucgagaauuuguguucaagaacaucgacgguuauuuuaagaucuacaguaagcauacucccauaaaucugguuagagaucucccgcaaggauuuuccgcacuggagccccuuguagaccuucccauuggaauaaacauaacacguuuccagacacuccucgcucugcauaggucauaucucaccccgggcgauucuuccagcggauggaccgcuggagcugcugcuuacuacguaggauaccugcaaccccggacauuucugcucaaguauaacgaaaaugggacuauuacggacgcuguggacugugcucuugacccacuuagcgagacaaaaugcacgcugaaaaguuuuaccguggagaaggggaucuaucaaacgagcaauuuuaggguucagccuaccgaaucaaucgucagauuucccaauaucacuaaccugugcccuuucggggaaguuuucaacgcaacccgguuugcgagcguauacgcuuggaaucgcaaaaggauaagcaauugcguugccgauuacuccguucuuuacaauucagcaucauuuucuacuuuuaaaugcuacggcgugucucccacaaaacugaaugaccuguguuuuacgaacguguaugcagacagcuuugugauuaggggugaugagguuagacaaaucgcaccaggucagaccgguaagaucgcugauuacaacuacaaacugcccgaugacuucacaggaugcgugauugccuggaauuccaacaaucuggauucuaagguuggcggcaauuacaauuaccuguauagguuguuucggaagucaaaccugaaacccuucgaaagagacauuucuaccgagauuuaucaagcggguucaacuccuuguaauggaguugaaggcuucaauuguuacuuuccccuucaaucauacggauuccaaccaaccaauggggucggauaccagccauauaggguuguuguccugucauucgaacuucuccacgcaccagccaccguauguggacccaagaagucuacuaaucuggugaagaacaaaugcgucaauuucaacuuuaauggguugaccggcacuggggugcugacugaauccaacaagaaguuucugccguuccaacaauucggacgcgauaucgcugauacaaccgaugccguuagagauccccaaacauuggagauucuggauauuacgccuuguucauucggugguguuuccgugauuaccccuggcaccaauacgaguaaccaaguggcggugcuguaucaagaugugaacuguacugaagugccgguggcuauacaugccgaccaacucacaccaacauggagaguauauagcacggguuccaauguguuucaaacuagggcuggcuguuugauuggcgcugaacauguuaauaauuccuaugaaugcgauauucccaucggugccgggauuugcgcaaguuaucaaacgcaaacuaacucccccgggucagcauccucugucgcuucccaaucaaucaucgccuauaccaugagucuuggggcagaaaauuccguugcuuauucuaacaauuccauugcaauuccuacgaacuucaccaucucaguuacuacagaaauacuucccgugucaaugacgaagacauccguagauugcacaauguauauauguggggacucaacugaaugcucaaaccugcuccugcaauacggaucauuuugcacccaacugaacagagcauugaccgguauagccguggagcaagauaagaacacucaagaaguauucgcccaggucaaacaaaucuauaaaacuccgccuauaaaagauuuuggcggcuuuaacuuuucccaaauacugccugacccaaguaagcccucaaaacguagcuuuauagaggaccucuuguuuaauaaggugacacucgcugacgcuggauucauuaagcaauauggugacugcuugggagauauugccgcccgcgaucucauuugugcacaaaaguucaacggccucacaguccugcccccucugcugacggaugaaaugaucgcucaauacaccucagcucuccuggcaggcaccauaacaagcggguggacauuuggugccggggcagcacugcaaaucccauucgcaaugcaaauggcuuauagguucaaugggaucggcguaacucaaaauguccucuacgagaaccagaaacucauagcuaaccaauucaauucugcaaucgggaaaauccaggacucccugagcucaacggccagcgcacugggcaagcuccaagauguggucaaccaaaacgcacaagcacugaauacucuugugaaacaacucagcuccaauuucggggcaauaucaaguguccucaaugauauucuuagcaggcuugauccacccgaagccgaggugcagaucgacaggcucauaacaggcaggcuccagucccuucaaacguauguaacucagcaacugauucgggcugccgagauucgagcuucagcuaauuuggcagcuacgaagaugagcgaaugcguccugggacagucuaaaagaguagacuuuugcggcaaaggguaucaucugaugagcuucccacaaagugcuccacauggcgugguuuuccugcaugucacuuauguucccgcacaagagaagaacuucacuaccgcaccagcgaucugucacgaugguaaagcacauuucccgcgggaaggcguauucguaucuaacggcacccacugguucguuacucaacgcaacuuuuaugaaccacaaaucauuacaaccgauaacacuuuuguuucaggcaauugcgauguugucaucggcauugugaauaacacuguguacgauccacuucaaccagaauuggacagcuuuaaagaggagcuugauaaguauuucaagaaucauaccucucccgacguggaccucggggacaucucuggaauaaaugcuagcgucguuaauauacagaaagagauugaucgucugaacgaaguggcuaagaaucugaaugaaagccuuaucgaucugcaagaacuggggaaguacgaacagggauacauaccggaagccccacgcgacggucaggcuuauguuaggaaggauggagaauggguuuugcucuccacguuucucgggcuugaaguuuuguuccaaggacccuggucacacccccaauuugagaaacaccaucaccaccaucaccaccacugauaa

SEQ ID NO: 97 - protein, 1266 aa, Artificial Sequence
  WuS_IgE_StrepHis_pVax
MDWTWILFLVAAATRVHSSQCVNLTTRTQLPPAYTNSFTRGVYYPDKVFRSSVLHSTQDLFLPFFSNVTWFHAIHVSGTNGTKRFDNPVLPFNDGVYFASTEKSNIIRGWIFGTTLDSKTQSLLIVNNATNVVIKVCEFQFCNDPFLGVYYHKNNKSWMESEFRVYSSANNCTFEYVSQPFLMDLEGKQGNFKNLREFVFKNIDGYFKIYSKHTPINLVRDLPQGFSALEPLVDLPIGINITRFQTLLALHRSYLTPGDSSSGWTAGAAAYYVGYLQPRTFLLKYNENGTITDAVDCALDPLSETKCTLKSFTVEKGIYQTSNFRVQPTESIVRFPNITNLCPFGEVFNATRFASVYAWNRKRISNCVADYSVLYNSASFSTFKCYGVSPTKLNDLCFTNVYADSFVIRGDEVRQIAPGQTGKIADYNYKLPDDFTGCVIAWNSNNLDSKVGGNYNYLYRLFRKSNLKPFERDISTEIYQAGSTPCNGVEGFNCYFPLQSYGFQPTNGVGYQPYRVVVLSFELLHAPATVCGPKKSTNLVKNKCVNFNFNGLTGTGVLTESNKKFLPFQQFGRDIADTTDAVRDPQTLEILDITPCSFGGVSVITPGTNTSNQVAVLYQDVNCTEVPVAIHADQLTPTWRVYSTGSNVFQTRAGCLIGAEHVNNSYECDIPIGAGICASYQTQTNSPGSASSVASQSIIAYTMSLGAENSVAYSNNSIAIPTNFTISVTTEILPVSMTKTSVDCTMYICGDSTECSNLLLQYGSFCTQLNRALTGIAVEQDKNTQEVFAQVKQIYKTPPIKDFGGFNFSQILPDPSKPSKRSFIEDLLFNKVTLADAGFIKQYGDCLGDIAARDLICAQKFNGLTVLPPLLTDEMIAQYTSALLAGTITSGWTFGAGAALQIPFAMQMAYRFNGIGVTQNVLYENQKLIANQFNSAIGKIQDSLSSTASALGKLQDVVNQNAQALNTLVKQLSSNFGAISSVLNDILSRLDPPEAEVQIDRLITGRLQSLQTYVTQQLIRAAEIRASANLAATKMSECVLGQSKRVDFCGKGYHLMSFPQSAPHGVVFLHVTYVPAQEKNFTTAPAICHDGKAHFPREGVFVSNGTHWFVTQRNFYEPQIITTDNTFVSGNCDVVIGIVNNTVYDPLQPELDSFKEELDKYFKNHTSPDVDLGDISGINASVVNIQKEIDRLNEVAKNLNESLIDLQELGKYEQGYIPEAPRDGQAYVRKDGEWVLLSTFLGLEVLFQGPWSHPQFEKHHHHHHHH

SEQ ID NO: 98 - DNA, 3738 bp, Artificial Sequence
  WuS_IgE_DownDS2_2P_pVax
gccaccatggactggacctggatactctttctcgtagcagcagccacacgagtgcattcatcacagtgcgttaatctgaccacccgtacacaactcccacccgcatacacaaatagctttacacgcggagtgtattaccccgataaagtctttcggagctcagtgctccattctactcaagatcttttcctgccgttctttagtaacgttacttggtttcatgcaatacatgtgtctggcacaaacggaaccaaacgttttgataatccggtgttgccatttaatgatggtgtatattttgcttccacggaaaagtcaaacatcatccgtgggtggatctttggcaccactcttgatagcaaatgtcaaagccttctgattgttaataacgctacaaacgtcgtaattaaagtgtgtgaattccagttctgtaatgaccccttcctcggagtatattaccacaagaataacaaatcttggatggagagcgaatttagagtttacagttcagccaataactgtacatttgaatatgtcagtcagcctttcctcatggacctcgaaggtaaacaaggtaattttaagaacttgagagagttcgtgtttaagaacatcgatggctatttcaaaatttactctaagcacacaccaatcaacctggttcgagacctgccccagggtttctcagctttggaaccattggtggacctgccaatcggcattaacattaccagatttcaaactttgttggcactccaccggtcatatcttacccccggagacagttcctcaggctggacggcaggcgccgccgcgtactatgttgggtatctccaaccccgaaccttccttctcaaatacaatgaaaacgggacgattacagatgcagtcgattgcgccctggaccccttgtccgaaactaaatgcactctgaagagtttcacggtagagaagggaatctatcaaacgagcaattttcgagtccaaccaacggaatctattgtgcggtttcccaatatcacaaacctctgtccattcggagaagtctttaatgctaccaggtttgcgtctgtatatgcatggaaccgaaagaggatttccaattgcgtagcggactacagtgtcctttataacagcgcttcattttccacgtttaagtgttatggtgtttctccaacgaaactcaacgacctctgttttactaacgtttacgctgacagctttgttatacgtggggacgaagtcaggcaaattgctcctggacagactggaaagatcgctgattataattataaacttcctgacgatttcaccggctgcgttattgcatggaactccaacaatctggattcaaaagtgggtggaaattataattatctgtataggttgtttcggaagagcaatcttaagccctttgagcgggacatatgtaccgaaatttaccaagcaggctccaccccatgcaatggagtagaagggttcaattgctattttcctctgcaaagttatggctttcaacccaccaacggagttgggtatcaaccttacagggttgtcgtgctgagtttcgaattgctccacgcacccgctacagtatgtggccccaagaagtccactaatcttgttaagaataaatgcgtgaacttcaacttcaatggacttacaggtactggagtactcacggaatcaaacaagaaatttctcccatttcaacagtttggccgagatatagctgacaccacagatgctgttcgcgacccccagacgttggaaatacttgatatcactccctgcagcttcggcggcgtgagcgtgatcactccaggtactaatacgagcaatcaagttgccgttctgtaccaagatgtgaactgcaccgaggttccagtggcaattcacgccgaccaacttactcccacctggcgggtctattccaccggatcaaacgtcttccaaactcgcgctggttgccttatcggtgcagagcacgttaataattcctatgaatgtgacattcccataggagcaggcatctgtgcatcttatcaaacccagactaattcccctggttccgcttcctctgttgcatcccagtccataattgcctacactatgagtctcggggctgaaaattccgtggcctattctaataattcaatcgccatcccaaccaattttaccatatccgtaacgactgaaatacttcctgtcagtatgaccaagacctcagtggactgcaccatgtacatctgcggcgattctactgaatgttccaatctgcttttgcaatatggttcattctgcacccaactcaacagggctcttacagggatcgccgtcgaacaggataagaatacccaggaagtgttcgcccaagttaagcaaatttacaagacaccacccatcaaggacttcggcgggttcaacttcagccaaattctgcccgacccgtctaagccttctaagcgctctttcattgaggatcttttgttcaataaggttacgcttgccgatgcagggtttatcaaacagtatggcgactgtcttggggatatcgcagctagggatcttatttgtgcacagaaatttaatggcctgactgttcttccccctttgctcactgacgagatgattgcccagtacacttcagctctcctggccgggactataacttctggttggaccttcggagctggcgccgccctgcaaattccatttgcaatgcagatggcttatcgcttcaacggaattggggtgacccaaaatgttctctacgagaaccagaaactcattgcaaaccagttcaattctgcgatcgggaagatccaggattccctgtctagtacggctagtgccctcggtaagctccaagacgtcgtcaaccaaaacgcccaggccttgaacacccttgtcaaacaactgagctccaattttggggctattagcagtgtgctgaatgatatcctgtcccgccttgacccaccggaagcggaagtccaaattgatcgactgatcactgggcgtctccaatcccttcaaacttacgtgacccaacaactcatccgagcagctgagattagggctagcgctaaccttgctgctactaagatgtcagagtgtgtcctcggccagtctaagagagtggacttttgtgggaaagggtaccacttgatgtcattcccacaaagcgccccacacggcgtggtgtttctccacgtcacttacgttccagctcaggaaaagaactttaccaccgcccccgctatatgtcatgatgggaaggcccactttcctcgtgaaggtgtctttgtcagcaatggcacacactggtttgtgacccaacggaatttctatgagcctcagattattaccacggataacactttcgtatcagggaattgtgatgtggttatcggcatcgttaataatacagtgtatgacccactgcagccagagcttgacagcttcaaagaagagctcgataagtactttaagaatcatacaagtcctgacgttgatcttggggatattagtgggattaacgccagcgtcgtcaatattcagaaagagattgacaggttgaacgaagtagctaagaatcttaatgaaagcctgatagatttgcaagaacttggtaagtatgagcaggggtacatacccgaggctcctcgggatgggcaggcctatgtacgcaaagacggtgaatgggtattgctcagcacttttctcggctgataa

SEQ ID NO: 99 - RNA, 3738 nt, Artificial Sequence
  WuS_IgE_DownDS2_2P_pVax
gccaccauggacuggaccuggauacucuuucucguagcagcagccacacgagugcauucaucacagugcguuaaucugaccacccguacacaacucccacccgcauacacaaauagcuuuacacgcggaguguauuaccccgauaaagucuuucggagcucagugcuccauucuacucaagaucuuuuccugccguucuuuaguaacguuacuugguuucaugcaauacaugugucuggcacaaacggaaccaaacguuuugauaauccgguguugccauuuaaugaugguguauauuuugcuuccacggaaaagucaaacaucauccguggguggaucuuuggcaccacucuugauagcaaaugucaaagccuucugauuguuaauaacgcuacaaacgucguaauuaaagugugugaauuccaguucuguaaugaccccuuccucggaguauauuaccacaagaauaacaaaucuuggauggagagcgaauuuagaguuuacaguucagccaauaacuguacauuugaauaugucagucagccuuuccucauggaccucgaagguaaacaagguaauuuuaagaacuugagagaguucguguuuaagaacaucgauggcuauuucaaaauuuacucuaagcacacaccaaucaaccugguucgagaccugccccaggguuucucagcuuuggaaccauugguggaccugccaaucggcauuaacauuaccagauuucaaacuuuguuggcacuccaccggucauaucuuacccccggagacaguuccucaggcuggacggcaggcgccgccgcguacuauguuggguaucuccaaccccgaaccuuccuucucaaauacaaugaaaacgggacgauuacagaugcagucgauugcgcccuggaccccuuguccgaaacuaaaugcacucugaagaguuucacgguagagaagggaaucuaucaaacgagcaauuuucgaguccaaccaacggaaucuauugugcgguuucccaauaucacaaaccucuguccauucggagaagucuuuaaugcuaccagguuugcgucuguauaugcauggaaccgaaagaggauuuccaauugcguagcggacuacaguguccuuuauaacagcgcuucauuuuccacguuuaaguguuaugguguuucuccaacgaaacucaacgaccucuguuuuacuaacguuuacgcugacagcuuuguuauacguggggacgaagucaggcaaauugcuccuggacagacuggaaagaucgcugauuauaauuauaaacuuccugacgauuucaccggcugcguuauugcauggaacuccaacaaucuggauucaaaaguggguggaaauuauaauuaucuguauagguuguuucggaagagcaaucuuaagcccuuugagcgggacauauguaccgaaauuuaccaagcaggcuccaccccaugcaauggaguagaaggguucaauugcuauuuuccucugcaaaguuauggcuuucaacccaccaacggaguuggguaucaaccuuacaggguugucgugcugaguuucgaauugcuccacgcacccgcuacaguauguggccccaagaaguccacuaaucuuguuaagaauaaaugcgugaacuucaacuucaauggacuuacagguacuggaguacucacggaaucaaacaagaaauuucucccauuucaacaguuuggccgagauauagcugacaccacagaugcuguucgcgacccccagacguuggaaauacuugauaucacucccugcagcuucggcggcgugagcgugaucacuccagguacuaauacgagcaaucaaguugccguucuguaccaagaugugaacugcaccgagguuccaguggcaauucacgccgaccaacuuacucccaccuggcgggucuauuccaccggaucaaacgucuuccaaacucgcgcugguugccuuaucggugcagagcacguuaauaauuccuaugaaugugacauucccauaggagcaggcaucugugcaucuuaucaaacccagacuaauuccccugguuccgcuuccucuguugcaucccaguccauaauugccuacacuaugagucucggggcugaaaauuccguggccuauucuaauaauucaaucgccaucccaaccaauuuuaccauauccguaacgacugaaauacuuccugucaguaugaccaagaccucaguggacugcaccauguacaucugcggcgauucuacugaauguuccaaucugcuuuugcaauaugguucauucugcacccaacucaacagggcucuuacagggaucgccgucgaacaggauaagaauacccaggaaguguucgcccaaguuaagcaaauuuacaagacaccacccaucaaggacuucggcggguucaacuucagccaaauucugcccgacccgucuaagccuucuaagcgcucuuucauugaggaucuuuuguucaauaagguuacgcuugccgaugcaggguuuaucaaacaguauggcgacugucuuggggauaucgcagcuagggaucuuauuugugcacagaaauuuaauggccugacuguucuucccccuuugcucacugacgagaugauugcccaguacacuucagcucuccuggccgggacuauaacuucugguuggaccuucggagcuggcgccgcccugcaaauuccauuugcaaugcagauggcuuaucgcuucaacggaauuggggugacccaaaauguucucuacgagaaccagaaacucauugcaaaccaguucaauucugcgaucgggaagauccaggauucccugucuaguacggcuagugcccucgguaagcuccaagacgucgucaaccaaaacgcccaggccuugaacacccuugucaaacaacugagcuccaauuuuggggcuauuagcagugugcugaaugauauccugucccgccuugacccaccggaagcggaaguccaaauugaucgacugaucacugggcgucuccaaucccuucaaacuuacgugacccaacaacucauccgagcagcugagauuagggcuagcgcuaaccuugcugcuacuaagaugucagaguguguccucggccagucuaagagaguggacuuuugugggaaaggguaccacuugaugucauucccacaaagcgccccacacggcgugguguuucuccacgucacuuacguuccagcucaggaaaagaacuuuaccaccgcccccgcuauaugucaugaugggaaggcccacuuuccucgugaaggugucuuugucagcaauggcacacacugguuugugacccaacggaauuucuaugagccucagauuauuaccacggauaacacuuucguaucagggaauugugaugugguuaucggcaucguuaauaauacaguguaugacccacugcagccagagcuugacagcuucaaagaagagcucgauaaguacuuuaagaaucauacaaguccugacguugaucuuggggauauuagugggauuaacgccagcgucgucaauauucagaaagagauugacagguugaacgaaguagcuaagaaucuuaaugaaagccugauagauuugcaagaacuugguaaguaugagcagggguacauacccgaggcuccucgggaugggcaggccuauguacgcaaagacggugaauggguauugcucagcacuuuucucggcugauaa

SEQ ID NO: 100 - protein, 1242 aa, Artificial Sequence
  WuS_IgE_DownDS2_2P_pVax
MDWTWILFLVAAATRVHSSQCVNLTTRTQLPPAYTNSFTRGVYYPDKVFRSSVLHSTQDLFLPFFSNVTWFHAIHVSGTNGTKRFDNPVLPFNDGVYFASTEKSNIIRGWIFGTTLDSKCQSLLIVNNATNVVIKVCEFQFCNDPFLGVYYHKNNKSWMESEFRVYSSANNCTFEYVSQPFLMDLEGKQGNFKNLREFVFKNIDGYFKIYSKHTPINLVRDLPQGFSALEPLVDLPIGINITRFQTLLALHRSYLTPGDSSSGWTAGAAAYYVGYLQPRTFLLKYNENGTITDAVDCALDPLSETKCTLKSFTVEKGIYQTSNFRVQPTESIVRFPNITNLCPFGEVFNATRFASVYAWNRKRISNCVADYSVLYNSASFSTFKCYGVSPTKLNDLCFTNVYADSFVIRGDEVRQIAPGQTGKIADYNYKLPDDFTGCVIAWNSNNLDSKVGGNYNYLYRLFRKSNLKPFERDICTEIYQAGSTPCNGVEGFNCYFPLQSYGFQPTNGVGYQPYRVVVLSFELLHAPATVCGPKKSTNLVKNKCVNFNFNGLTGTGVLTESNKKFLPFQQFGRDIADTTDAVRDPQTLEILDITPCSFGGVSVITPGTNTSNQVAVLYQDVNCTEVPVAIHADQLTPTWRVYSTGSNVFQTRAGCLIGAEHVNNSYECDIPIGAGICASYQTQTNSPGSASSVASQSIIAYTMSLGAENSVAYSNNSIAIPTNFTISVTTEILPVSMTKTSVDCTMYICGDSTECSNLLLQYGSFCTQLNRALTGIAVEQDKNTQEVFAQVKQIYKTPPIKDFGGFNFSQILPDPSKPSKRSFIEDLLFNKVTLADAGFIKQYGDCLGDIAARDLICAQKFNGLTVLPPLLTDEMIAQYTSALLAGTITSGWTFGAGAALQIPFAMQMAYRFNGIGVTQNVLYENQKLIANQFNSAIGKIQDSLSSTASALGKLQDVVNQNAQALNTLVKQLSSNFGAISSVLNDILSRLDPPEAEVQIDRLITGRLQSLQTYVTQQLIRAAEIRASANLAATKMSECVLGQSKRVDFCGKGYHLMSFPQSAPHGVVFLHVTYVPAQEKNFTTAPAICHDGKAHFPREGVFVSNGTHWFVTQRNFYEPQIITTDNTFVSGNCDVVIGIVNNTVYDPLQPELDSFKEELDKYFKNHTSPDVDLGDISGINASVVNIQKEIDRLNEVAKNLNESLIDLQELGKYEQGYIPEAPRDGQAYVRKDGEWVLLSTFLG

SEQ ID NO: 101 - DNA, 3738 bp, Artificial Sequence
  WuS_IgE_DownDS1_2P_pVax
gccaccatggactggacctggatactctttctcgtagcagcagccacacgagtgcattcatcccagtgcgtgaacctgaccacccgaactcaactcccaccagcatacaccaactcatttacaagaggagtttattacccggacaaggtatttcgaagttcagttcttcacagcacccaagacctgtttctgccattcttcagtaatgtcacttggtttcacgcgatacatgtcagcggtacaaacgggacaaagcgattcgataacccagtactcccattcaacgacggagtgtattttgcatctacagagaaatccaacattatacgcgggtggatctttggaactactctggactccaagacacagagcctgctcattgtgaacaatgcaacgaatgtcgtcataaaagtctgtgaatttcaattttgcaacgatcctttcctcggagtctattaccataagaacaataagagttggatggagagtgagtttcgcgtctattcttccgcgaacaattgtacatttgaatatgtatcacaaccctttcttatggatttggaaggcaaacaaggtaacttcaagaacttgcgcgagttcgtgttcaagaacatagactgttattttaagatctatagtaagcatacgccaatcaatctggtgcgagatttgcctcagggcttttctgctcttgaacccttggttgatctgcccatcgggatcaacataaccagatttcaaacgttgctcgcactccaccgcagctatctcactcctggcgattcctcatctgggtggaccgccggagctgctgcttattacgtcggctatctccagccgcgtactttcctgctcaagtataatgagaatggcaccattaccgatgctgtggattgtgctcttgatccactctctgaaaccaaatgcactctcaagtcttttaccgtggaaaagggtatttatcagacatctaattttcgggtgcaacctactgagtcaattgtacggtttcctaacataactaacctttgtccatttggggaagtcttcaatgccacgcggttcgcatcagtctatgcatggaacagaaaacgtatctccaactgcgtcgccgattattccgtcctttacaatagcgctagcttttccacattcaaatgttatggcgtatcaccaaccaaacttaacgatctctgctttactaatgtctacgctgactctttcgttattcgaggtgacgaggtgcgccaaattgcgcctggtcaaaccggaaagattgccgattataactacaagctccccgacgactttacgggttgtgtgatcgcctggaatagcaataacctcgattctaaagttggcggtaattataactatctgtacagactctttaggaaaagtaatctcaagcccttttgcagggatatctcaaccgaaatctaccaagccggcagcactccttgcaatggtgtcgaggggtttaattgttatttcccactgcaatcttacggctttcaaccgactaatggagtcggttatcaaccctatagggtggtggtactctcctttgaacttttgcacgctccggcaacagtttgtggaccaaagaaaagtacgaaccttgttaagaataagtgtgttaatttcaattttaacggcctcactggaacaggtgtcctcacagaaagcaacaagaagtttctccctttccaacagtttggacgggatatcgccgacactactgacgccgtcagagatcctcaaactctcgaaatcttggatatcacaccatgttctttcggtggtgtctccgtcataacaccaggaactaacacctctaatcaagtggccgtgctctatcaggacgtcaattgcacagaagtgcctgtcgcaatccatgctgatcagctcactcccacctggcgtgtgtattccactggctctaatgtctttcagacacgggcaggttgccttattggggcagagcatgtgaacaattcctacgaatgcgatatacccattggggcaggcatttgcgccagctaccaaacccaaactaacagccccgggagtgccagcagcgtggcatctcagtccattattgcctatacgatgagcctgggtgctgaaaatagcgtggcttatagtaataactctatcgccatacccacaaacttcaccatttcagtgaccaccgaaatccttcctgtttctatgaccaaaacgtccgtcgattgtacaatgtacatttgcggcgatagcactgaatgttcaaacctgctcctgcaatacggctctttctgtactcagctcaaccgggcactcaccggcatagccgtcgaacaagacaagaatacccaggaagtctttgcgcaggtgaaacaaatctataagaccccaccaataaaagatttcggcggttttaatttcagccaaatcttgcctgatcccagcaagccatctaaacggtctttcattgaagatctcctgttcaacaaggttacgctggctgacgccgggtttattaagcaatatggcgattgccttggggacattgccgcacgagacctcatttgtgcccagaaattcaacgggctcaccgtattgcccccgctcctcacagacgaaatgatcgcccaatatacaagcgccctgcttgcgggaaccattacaagcggttggacctttggtgccggcgcagctctgcaaatacccttcgcaatgcaaatggcatatcggtttaatggaattggcgtaacccaaaacgtgctgtatgaaaaccagaaactgatcgcaaatcaattcaatagtgctataggaaagatccaagacagtctgtcttccactgctagcgcgctggggaagctccaagacgttgtgaaccaaaacgcgcaggccctgaataccctggtgaagcaactttcaagcaatttcggtgctatatcttctgtcctcaatgacattctctctcggctcgatcccccggaagccgaagttcagatagaccgtttgatcacaggccgcttgcaatccctgcaaacctacgttacacaacaactgattcgcgccgccgaaattcgggcatccgccaatctggccgcaaccaaaatgtccgagtgtgttctcggtcaatccaaacgcgtggatttctgcggaaaaggataccatttgatgtcatttccacaatcagctccacacggtgttgtattcctgcacgtgacctacgtgccagcccaggagaagaattttactactgcgcccgccatttgtcatgacgggaaggctcattttcctcgggaaggggttttcgtctcaaacggtacccattggttcgtgactcagaggaacttttatgaacctcaaatcataacgaccgataacacgtttgtaagtggcaattgcgacgtggtcatcgggattgtaaacaatactgtctatgaccctctccaaccagagcttgacagctttaaagaagagcttgataaatactttaagaaccatacctcaccagacgtcgatttgggagatatcagtggcattaatgcctctgtcgtcaatatccagaaagagattgaccgcttgaacgaagttgccaagaatcttaatgagtctctgattgacttgcaagaattgggaaaatatgaacaaggatatattccagaagcccctcgcgatgggcaagcatatgttcgaaaggatggggaatgggtgctgctcagcacctttctcggttgataa

SEQ ID NO: 102 - RNA, 3738 nt, Artificial Sequence
  WuS_IgE_DownDS1_2P_pVax
gccaccauggacuggaccuggauacucuuucucguagcagcagccacacgagugcauucaucccagugcgugaaccugaccacccgaacucaacucccaccagcauacaccaacucauuuacaagaggaguuuauuacccggacaagguauuucgaaguucaguucuucacagcacccaagaccuguuucugccauucuucaguaaugucacuugguuucacgcgauacaugucagcgguacaaacgggacaaagcgauucgauaacccaguacucccauucaacgacggaguguauuuugcaucuacagagaaauccaacauuauacgcggguggaucuuuggaacuacucuggacuccaagacacagagccugcucauugugaacaaugcaacgaaugucgucauaaaagucugugaauuucaauuuugcaacgauccuuuccucggagucuauuaccauaagaacaauaagaguuggauggagagugaguuucgcgucuauucuuccgcgaacaauuguacauuugaauauguaucacaacccuuucuuauggauuuggaaggcaaacaagguaacuucaagaacuugcgcgaguucguguucaagaacauagacuguuauuuuaagaucuauaguaagcauacgccaaucaaucuggugcgagauuugccucagggcuuuucugcucuugaacccuugguugaucugcccaucgggaucaacauaaccagauuucaaacguugcucgcacuccaccgcagcuaucucacuccuggcgauuccucaucuggguggaccgccggagcugcugcuuauuacgucggcuaucuccagccgcguacuuuccugcucaaguauaaugagaauggcaccauuaccgaugcuguggauugugcucuugauccacucucugaaaccaaaugcacucucaagucuuuuaccguggaaaaggguauuuaucagacaucuaauuuucgggugcaaccuacugagucaauuguacgguuuccuaacauaacuaaccuuuguccauuuggggaagucuucaaugccacgcgguucgcaucagucuaugcauggaacagaaaacguaucuccaacugcgucgccgauuauuccguccuuuacaauagcgcuagcuuuuccacauucaaauguuauggcguaucaccaaccaaacuuaacgaucucugcuuuacuaaugucuacgcugacucuuucguuauucgaggugacgaggugcgccaaauugcgccuggucaaaccggaaagauugccgauuauaacuacaagcuccccgacgacuuuacggguugugugaucgccuggaauagcaauaaccucgauucuaaaguuggcgguaauuauaacuaucuguacagacucuuuaggaaaaguaaucucaagcccuuuugcagggauaucucaaccgaaaucuaccaagccggcagcacuccuugcaauggugucgagggguuuaauuguuauuucccacugcaaucuuacggcuuucaaccgacuaauggagucgguuaucaacccuauaggguggugguacucuccuuugaacuuuugcacgcuccggcaacaguuuguggaccaaagaaaaguacgaaccuuguuaagaauaaguguguuaauuucaauuuuaacggccucacuggaacagguguccucacagaaagcaacaagaaguuucucccuuuccaacaguuuggacgggauaucgccgacacuacugacgccgucagagauccucaaacucucgaaaucuuggauaucacaccauguucuuucgguggugucuccgucauaacaccaggaacuaacaccucuaaucaaguggccgugcucuaucaggacgucaauugcacagaagugccugucgcaauccaugcugaucagcucacucccaccuggcguguguauuccacuggcucuaaugucuuucagacacgggcagguugccuuauuggggcagagcaugugaacaauuccuacgaaugcgauauacccauuggggcaggcauuugcgccagcuaccaaacccaaacuaacagccccgggagugccagcagcguggcaucucaguccauuauugccuauacgaugagccugggugcugaaaauagcguggcuuauaguaauaacucuaucgccauacccacaaacuucaccauuucagugaccaccgaaauccuuccuguuucuaugaccaaaacguccgucgauuguacaauguacauuugcggcgauagcacugaauguucaaaccugcuccugcaauacggcucuuucuguacucagcucaaccgggcacucaccggcauagccgucgaacaagacaagaauacccaggaagucuuugcgcaggugaaacaaaucuauaagaccccaccaauaaaagauuucggcgguuuuaauuucagccaaaucuugccugaucccagcaagccaucuaaacggucuuucauugaagaucuccuguucaacaagguuacgcuggcugacgccggguuuauuaagcaauauggcgauugccuuggggacauugccgcacgagaccucauuugugcccagaaauucaacgggcucaccguauugcccccgcuccucacagacgaaaugaucgcccaauauacaagcgcccugcuugcgggaaccauuacaagcgguuggaccuuuggugccggcgcagcucugcaaauacccuucgcaaugcaaauggcauaucgguuuaauggaauuggcguaacccaaaacgugcuguaugaaaaccagaaacugaucgcaaaucaauucaauagugcuauaggaaagauccaagacagucugucuuccacugcuagcgcgcuggggaagcuccaagacguugugaaccaaaacgcgcaggcccugaauacccuggugaagcaacuuucaagcaauuucggugcuauaucuucuguccucaaugacauucucucucggcucgaucccccggaagccgaaguucagauagaccguuugaucacaggccgcuugcaaucccugcaaaccuacguuacacaacaacugauucgcgccgccgaaauucgggcauccgccaaucuggccgcaaccaaaauguccgaguguguucucggucaauccaaacgcguggauuucugcggaaaaggauaccauuugaugucauuuccacaaucagcuccacacgguguuguauuccugcacgugaccuacgugccagcccaggagaagaauuuuacuacugcgcccgccauuugucaugacgggaaggcucauuuuccucgggaagggguuuucgucucaaacgguacccauugguucgugacucagaggaacuuuuaugaaccucaaaucauaacgaccgauaacacguuuguaaguggcaauugcgacguggucaucgggauuguaaacaauacugucuaugacccucuccaaccagagcuugacagcuuuaaagaagagcuugauaaauacuuuaagaaccauaccucaccagacgucgauuugggagauaucaguggcauuaaugccucugucgucaauauccagaaagagauugaccgcuugaacgaaguugccaagaaucuuaaugagucucugauugacuugcaagaauugggaaaauaugaacaaggauauauuccagaagccccucgcgaugggcaagcauauguucgaaaggauggggaaugggugcugcucagcaccuuucucgguugauaa

SEQ ID NO: 103 - protein, 1242 aa, Artificial Sequence
  WuS_IgE_DownDS1_2P_pVax
MDWTWILFLVAAATRVHSSQCVNLTTRTQLPPAYTNSFTRGVYYPDKVFRSSVLHSTQDLFLPFFSNVTWFHAIHVSGTNGTKRFDNPVLPFNDGVYFASTEKSNIIRGWIFGTTLDSKTQSLLIVNNATNVVIKVCEFQFCNDPFLGVYYHKNNKSWMESEFRVYSSANNCTFEYVSQPFLMDLEGKQGNFKNLREFVFKNIDCYFKIYSKHTPINLVRDLPQGFSALEPLVDLPIGINITRFQTLLALHRSYLTPGDSSSGWTAGAAAYYVGYLQPRTFLLKYNENGTITDAVDCALDPLSETKCTLKSFTVEKGIYQTSNFRVQPTESIVRFPNITNLCPFGEVFNATRFASVYAWNRKRISNCVADYSVLYNSASFSTFKCYGVSPTKLNDLCFTNVYADSFVIRGDEVRQIAPGQTGKIADYNYKLPDDFTGCVIAWNSNNLDSKVGGNYNYLYRLFRKSNLKPFCRDISTEIYQAGSTPCNGVEGFNCYFPLQSYGFQPTNGVGYQPYRVVVLSFELLHAPATVCGPKKSTNLVKNKCVNFNFNGLTGTGVLTESNKKFLPFQQFGRDIADTTDAVRDPQTLEILDITPCSFGGVSVITPGTNTSNQVAVLYQDVNCTEVPVAIHADQLTPTWRVYSTGSNVFQTRAGCLIGAEHVNNSYECDIPIGAGICASYQTQTNSPGSASSVASQSIIAYTMSLGAENSVAYSNNSIAIPTNFTISVTTEILPVSMTKTSVDCTMYICGDSTECSNLLLQYGSFCTQLNRALTGIAVEQDKNTQEVFAQVKQIYKTPPIKDFGGFNFSQILPDPSKPSKRSFIEDLLFNKVTLADAGFIKQYGDCLGDIAARDLICAQKFNGLTVLPPLLTDEMIAQYTSALLAGTITSGWTFGAGAALQIPFAMQMAYRFNGIGVTQNVLYENQKLIANQFNSAIGKIQDSLSSTASALGKLQDVVNQNAQALNTLVKQLSSNFGAISSVLNDILSRLDPPEAEVQIDRLITGRLQSLQTYVTQQLIRAAEIRASANLAATKMSECVLGQSKRVDFCGKGYHLMSFPQSAPHGVVFLHVTYVPAQEKNFTTAPAICHDGKAHFPREGVFVSNGTHWFVTQRNFYEPQIITTDNTFVSGNCDVVIGIVNNTVYDPLQPELDSFKEELDKYFKNHTSPDVDLGDISGINASVVNIQKEIDRLNEVAKNLNESLIDLQELGKYEQGYIPEAPRDGQAYVRKDGEWVLLSTFLG

SEQ ID NO: 104 - DNA, 3747 bp, Artificial Sequence
  WuS_IgE_2P_UpGly_pVax
gccaccatggattggacctggatacttttcctcgtggccgcagcaacaagagtccactcctctcagtgcgttaacctgactactagaacccaattgcccccggcatacacaaactctttcacccggggtgtctactatcccgacaaagtgtttagaagtagcgtgctgcacagcacccaagatctctttctgccattcttctcaaacgtcacctggtttcacgccatccatgtaagcgggaccaacggcacaaagcgttttgataaccctgttttgccattcaatgatggcgtgtattttgcttccactgagaaaagcaacatcattagagggtggatatttggcacaacgcttgactccaagacgcagagtcttttgatagtaaacaacgcaactaatgtggtcattaaagtctgtgaatttcaattttgcaatgaccccttccttggagtctattaccacaagaacaacaaaagctggatggaaagcgaatttagggtctacagctctgccaataactgcacattcgaatacgtcagccaaccattcttgatggacctggaaggcaagcaaggaaactttaagaatctgagggaatttgtgtttaagaatatcgacggatattttaagatctattccaagcatactcccattaatctcgttcgtgaccttcctcagggtttctctgcattggaacccctcgtagatttgcccattgggattaatatcactagattccagacgctgcttgcactccatcgatcttatctgacccctggtgactcctcttccgggtggacggcgggtgctgcagcctactacgttggctatttgcaacctaggacctttctgttgaagtataatgagaatgggactattactgatgccgttgattgcgccctcgatccgctgtcagaaacaaagtgcaccctgaagagcttcacagtagaaaagggaatctatcaaacctcaaatttccgcgttcaaccaactgaatcaatcgtgcgttttcctaacatcacaaatctgtgtccgtttggagaagtatttaatgcgacgcgtttcgcaagcgtctacgcgtggaatcgcaaacgtatctctaattgcgtagcagattattctgtgctgtacaatagcgcatctttctcaacgtttaagtgctacggcgttaatgggaccaagctgaatgatctctgtttcactaatgtgtacgcagacagttttgtaattagaggagacgaggttaggcaaatagcaccgggtcaaactggcaaaatcgccgactataactacaagctccctgatgacttcacgggctgcgtaattgcttggaactctaataacctggactctaaagtcggcgggaattataattatctctatcggttgtttcgaaaatccaatctcaaaccctttgagcgggacatcaatactacaatttatcaagctggtagtactccttgcaatggggtagaaggcttcaattgttatttcccccttcaatcttacggatttcaacccacgaacggcgtagggtaccagccctatcgagtggtggtactgtcattcgaacttaatcacgccccagcaacagtctgcgggcctaagaaaagcacgaatcttgtcaagaataagtgtgtaaatttcaacttcaatggtcttacaggcacgggagtgctcactgagtctaataagaaatttcttcctttccaacaattcggtcgtgatattgccgatactactgatgcagtccgagatccacaaactctcgaaatcctcgatattactccttgtagttttggcggcgtctccgtgatcaccccagggaccaacactagtaaccaagtggcggtgctctaccaagatgttaactgcacagaagtcccggtagcgatccatgccgaccagctcactcccacatggcgtgtttacagcacagggtcaaacgttttccagacccgtgccggatgtcttataggagccgaacacgtaaataacagttatgaatgcgatatcccaattggtgcaggtatctgtgcgtcatatcaaacccaaactaattctccggggtccgcctcaagcgttgcctcacaatcaataatcgcctacacaatgtccctcggtgccgaaaattcagtcgcttactctaacaatagcattgctatccctaccaacttcactatttctgttaccacggaaattttgcctgtatccatgaccaaaacatctgttgattgcacgatgtacatctgcggggattctaccgaatgttctaacctgcttctgcaatacggctccttctgcacccaattgaaccgcgcactgactgggattgctgtggaacaagacaagaatactcaagaagtatttgcccaggtcaaacagatttacaaaactcccccaattaaagatttcggcggtttcaattttagtcaaattctgccagatccaagtaagccatccaaacgctcatttattgaggacctgctctttaataaagtcacgctggccgacgccggcttcataaaacagtatggcgattgtcttggagacatcgccgcccgcgacctcatttgcgcacaaaagttcaatgggctcaccgtgttgccaccactgctcacagatgagatgatcgcacagtacacgagcgcccttcttgccggcactatcacgtctggttggacgttcggtgccggagccgctctgcaaattccctttgcaatgcaaatggcctatagatttaatggaattggcgtaacacagaacgtgttgtacgagaaccagaagctcattgccaaccagttcaattccgctattggcaaaatacaagactctctcagctcaactgctagcgcactgggaaaattgcaagacgtagtcaatcaaaatgcccaagccctcaatactctcgtcaaacagttgtcttccaactttggggctatcagtagtgtactcaatgacattctttcaagactggacccgcccgaggcggaagtccaaattgatcgtctgataactggaaggttgcaaagccttcagacctacgttacgcaacaacttattagggctgccgaaataagggcatccgctaatctggcagctacaaagatgtctgaatgtgttttgggacagagcaaacgggttgacttctgcggtaaaggttaccatctcatgtcttttccacaaagcgcaccgcacggagtcgtcttcctgcatgtaacatacgtcccagcccaagaaaagaattttaccacagccccagccatctgccacgacggcaaggcgcatttcccaagggaaggcgtgtttgtatccaacgggacgcattggtttgtcactcaaaggaacttttacgaaccccaaattattaccactgataacaccttcgtttctgggaactgtgatgtcgtgattgggatagtaaacaacacggtatatgatccactgcaaccagaactggattccttcaaagaagagctggacaaatacttcaagaatcatactagtcctgacgtcgacctgggcgatatcagtggaatcaacgctagcgtcgtaaacattcaaaaggagatcgatagacttaacgaggtcgccaagaatctcaatgaaagcctcatcgatttgcaagaactcggaaaatatgagcaaagcggatcagggtacattccggaagcccccagggacggacaggcatatgtccgcaaggacggagaatgggttcttcttagcacttttctggggtaatga

SEQ ID NO: 105 - RNA, 3747 nt, Artificial Sequence
  WuS_IgE_2P_UpGly_pVax
gccaccauggauuggaccuggauacuuuuccucguggccgcagcaacaagaguccacuccucucagugcguuaaccugacuacuagaacccaauugcccccggcauacacaaacucuuucacccggggugucuacuaucccgacaaaguguuuagaaguagcgugcugcacagcacccaagaucucuuucugccauucuucucaaacgucaccugguuucacgccauccauguaagcgggaccaacggcacaaagcguuuugauaacccuguuuugccauucaaugauggcguguauuuugcuuccacugagaaaagcaacaucauuagaggguggauauuuggcacaacgcuugacuccaagacgcagagucuuuugauaguaaacaacgcaacuaauguggucauuaaagucugugaauuucaauuuugcaaugaccccuuccuuggagucuauuaccacaagaacaacaaaagcuggauggaaagcgaauuuagggucuacagcucugccaauaacugcacauucgaauacgucagccaaccauucuugauggaccuggaaggcaagcaaggaaacuuuaagaaucugagggaauuuguguuuaagaauaucgacggauauuuuaagaucuauuccaagcauacucccauuaaucucguucgugaccuuccucaggguuucucugcauuggaaccccucguagauuugcccauugggauuaauaucacuagauuccagacgcugcuugcacuccaucgaucuuaucugaccccuggugacuccucuuccggguggacggcgggugcugcagccuacuacguuggcuauuugcaaccuaggaccuuucuguugaaguauaaugagaaugggacuauuacugaugccguugauugcgcccucgauccgcugucagaaacaaagugcacccugaagagcuucacaguagaaaagggaaucuaucaaaccucaaauuuccgcguucaaccaacugaaucaaucgugcguuuuccuaacaucacaaaucuguguccguuuggagaaguauuuaaugcgacgcguuucgcaagcgucuacgcguggaaucgcaaacguaucucuaauugcguagcagauuauucugugcuguacaauagcgcaucuuucucaacguuuaagugcuacggcguuaaugggaccaagcugaaugaucucuguuucacuaauguguacgcagacaguuuuguaauuagaggagacgagguuaggcaaauagcaccgggucaaacuggcaaaaucgccgacuauaacuacaagcucccugaugacuucacgggcugcguaauugcuuggaacucuaauaaccuggacucuaaagucggcgggaauuauaauuaucucuaucgguuguuucgaaaauccaaucucaaacccuuugagcgggacaucaauacuacaauuuaucaagcugguaguacuccuugcaaugggguagaaggcuucaauuguuauuucccccuucaaucuuacggauuucaacccacgaacggcguaggguaccagcccuaucgaguggugguacugucauucgaacuuaaucacgccccagcaacagucugcgggccuaagaaaagcacgaaucuugucaagaauaaguguguaaauuucaacuucaauggucuuacaggcacgggagugcucacugagucuaauaagaaauuucuuccuuuccaacaauucggucgugauauugccgauacuacugaugcaguccgagauccacaaacucucgaaauccucgauauuacuccuuguaguuuuggcggcgucuccgugaucaccccagggaccaacacuaguaaccaaguggcggugcucuaccaagauguuaacugcacagaagucccgguagcgauccaugccgaccagcucacucccacauggcguguuuacagcacagggucaaacguuuuccagacccgugccggaugucuuauaggagccgaacacguaaauaacaguuaugaaugcgauaucccaauuggugcagguaucugugcgucauaucaaacccaaacuaauucuccgggguccgccucaagcguugccucacaaucaauaaucgccuacacaaugucccucggugccgaaaauucagucgcuuacucuaacaauagcauugcuaucccuaccaacuucacuauuucuguuaccacggaaauuuugccuguauccaugaccaaaacaucuguugauugcacgauguacaucugcggggauucuaccgaauguucuaaccugcuucugcaauacggcuccuucugcacccaauugaaccgcgcacugacugggauugcuguggaacaagacaagaauacucaagaaguauuugcccaggucaaacagauuuacaaaacucccccaauuaaagauuucggcgguuucaauuuuagucaaauucugccagauccaaguaagccauccaaacgcucauuuauugaggaccugcucuuuaauaaagucacgcuggccgacgccggcuucauaaaacaguauggcgauugucuuggagacaucgccgcccgcgaccucauuugcgcacaaaaguucaaugggcucaccguguugccaccacugcucacagaugagaugaucgcacaguacacgagcgcccuucuugccggcacuaucacgucugguuggacguucggugccggagccgcucugcaaauucccuuugcaaugcaaauggccuauagauuuaauggaauuggcguaacacagaacguguuguacgagaaccagaagcucauugccaaccaguucaauuccgcuauuggcaaaauacaagacucucucagcucaacugcuagcgcacugggaaaauugcaagacguagucaaucaaaaugcccaagcccucaauacucucgucaaacaguugucuuccaacuuuggggcuaucaguaguguacucaaugacauucuuucaagacuggacccgcccgaggcggaaguccaaauugaucgucugauaacuggaagguugcaaagccuucagaccuacguuacgcaacaacuuauuagggcugccgaaauaagggcauccgcuaaucuggcagcuacaaagaugucugaauguguuuugggacagagcaaacggguugacuucugcgguaaagguuaccaucucaugucuuuuccacaaagcgcaccgcacggagucgucuuccugcauguaacauacgucccagcccaagaaaagaauuuuaccacagccccagccaucugccacgacggcaaggcgcauuucccaagggaaggcguguuuguauccaacgggacgcauugguuugucacucaaaggaacuuuuacgaaccccaaauuauuaccacugauaacaccuucguuucugggaacugugaugucgugauugggauaguaaacaacacgguauaugauccacugcaaccagaacuggauuccuucaaagaagagcuggacaaauacuucaagaaucauacuaguccugacgucgaccugggcgauaucaguggaaucaacgcuagcgucguaaacauucaaaaggagaucgauagacuuaacgaggucgccaagaaucucaaugaaagccucaucgauuugcaagaacucggaaaauaugagcaaagcggaucaggguacauuccggaagcccccagggacggacaggcauauguccgcaaggacggagaauggguucuucuuagcacuuuucugggguaauga

SEQ ID NO: 106 - protein, 1245 aa, Artificial Sequence
  WuS_IgE_2P_UpGly_pVax
MDWTWILFLVAAATRVHSSQCVNLTTRTQLPPAYTNSFTRGVYYPDKVFRSSVLHSTQDLFLPFFSNVTWFHAIHVSGTNGTKRFDNPVLPFNDGVYFASTEKSNIIRGWIFGTTLDSKTQSLLIVNNATNVVIKVCEFQFCNDPFLGVYYHKNNKSWMESEFRVYSSANNCTFEYVSQPFLMDLEGKQGNFKNLREFVFKNIDGYFKIYSKHTPINLVRDLPQGFSALEPLVDLPIGINITRFQTLLALHRSYLTPGDSSSGWTAGAAAYYVGYLQPRTFLLKYNENGTITDAVDCALDPLSETKCTLKSFTVEKGIYQTSNFRVQPTESIVRFPNITNLCPFGEVFNATRFASVYAWNRKRISNCVADYSVLYNSASFSTFKCYGVNGTKLNDLCFTNVYADSFVIRGDEVRQIAPGQTGKIADYNYKLPDDFTGCVIAWNSNNLDSKVGGNYNYLYRLFRKSNLKPFERDINTTIYQAGSTPCNGVEGFNCYFPLQSYGFQPTNGVGYQPYRVVVLSFELNHAPATVCGPKKSTNLVKNKCVNFNFNGLTGTGVLTESNKKFLPFQQFGRDIADTTDAVRDPQTLEILDITPCSFGGVSVITPGTNTSNQVAVLYQDVNCTEVPVAIHADQLTPTWRVYSTGSNVFQTRAGCLIGAEHVNNSYECDIPIGAGICASYQTQTNSPGSASSVASQSIIAYTMSLGAENSVAYSNNSIAIPTNFTISVTTEILPVSMTKTSVDCTMYICGDSTECSNLLLQYGSFCTQLNRALTGIAVEQDKNTQEVFAQVKQIYKTPPIKDFGGFNFSQILPDPSKPSKRSFIEDLLFNKVTLADAGFIKQYGDCLGDIAARDLICAQKFNGLTVLPPLLTDEMIAQYTSALLAGTITSGWTFGAGAALQIPFAMQMAYRFNGIGVTQNVLYENQKLIANQFNSAIGKIQDSLSSTASALGKLQDVVNQNAQALNTLVKQLSSNFGAISSVLNDILSRLDPPEAEVQIDRLITGRLQSLQTYVTQQLIRAAEIRASANLAATKMSECVLGQSKRVDFCGKGYHLMSFPQSAPHGVVFLHVTYVPAQEKNFTTAPAICHDGKAHFPREGVFVSNGTHWFVTQRNFYEPQIITTDNTFVSGNCDVVIGIVNNTVYDPLQPELDSFKEELDKYFKNHTSPDVDLGDISGINASVVNIQKEIDRLNEVAKNLNESLIDLQELGKYEQSGSGYIPEAPRDGQAYVRKDGEWVLLSTFLG

SEQ ID NO: 107 - DNA, 3834 bp, Artificial Sequence
  WuS_DownDS3_D2P_Furin_pVax
gccaccatggactggacctggatactctttctcgtagcagcagccacacgagtgcattcaatgttcgttttcctcgtgctcttgcctttggtttcttctcagtgcgtaaacctcacgactcgaacccaactgcccccagcttatacaaattcctttacgcggggcgtctattacccggataaggttttcagatccagcgtgctgcatagtacacaagatctctttcttcctttcttctcaaatgtaacctggtttcacgctattcatgtatccggcaccaatggaactaaaagatttgataacccggtgttgcccttcaatgatggtgtgtatttcgcttccacggaaaagtcaaacatcatcagagggtggatattcggcacaacattggattccaagtgccagtcactcctcatagtgaacaatgctactaacgtggttataaaggtctgcgaatttcaattttgtaatgatcctttcctcggtgtttactatcacaagaacaataagtcctggatggaatcagaattccgtgtatacagttctgcgaacaattgcacattcgaatatgtgtcccaaccctttctcatggatctggaagggaagcagggtaactttaagaatctgagagaattcgtgttcaagaacattgactgctattttaaaatctatagcaaacacacccctataaacttggtacgggatttgcctcaaggattctcagcactcgaacccttggtcgatttgccaatcggcatcaatatcacccggtttcagacactcctggctcttcaccgctcctacttgacacctggtgattcctcatctggttggaccgccggcgcagcggcatactatgtcggctatcttcaaccaagaaccttcttgctgaaatataatgagaacggaactataactgatgccgttgattgtgcccttgatccacttagcgaaacaaagtgcactctgaagtccttcacagttgaaaaggggatctaccaaacatccaacttccgggtacaacctactgagtccatagtgcgatttcctaacattaccaatctgtgcccatttggagaagtattcaacgcaactaggttcgcgtccgtttacgcgtggaacaggaaaaggatttccaattgcgtcgccgactatagcgttctctataacagcgcctcatttagcacgtttaagtgttacggggttagtccgaccaaactcaatgacttgtgttttaccaatgtctatgcagactcctttgttattagaggcgacgaggtcagacaaattgcccccggacagacaggtaagattgcagattataattataaactgccggacgacttcacggggtgtgttattgcatggaactccaataacctggactctaaagtaggcgggaactataactatctgtatcgcctgtttcgcaaatctaacctgaaacccttctgcagggacatatgtactgaaatatatcaagctggcagcacaccttgtaatggcgtcgagggattcaattgttacttcccacttcaatcttacggttttcagcctactaacggcgtagggtatcaaccctatagagttgtagtgctctctttcgaattgctccatgcccccgcgactgtttgtggacctaagaagtccacgaacctggtaaagaacaagtgtgttaattttaattttaatggactgaccgggactggagtgctgactgaaagtaacaagaaatttctgcctttccaacaatttggccgcgatatcgctgataccaccgacgccgtcagagatccgcagactctcgaaatcctggacatcacgccctgctcattcggcggggttagcgttattactccaggcactaacactagcaatcaagttgcagttctgtaccaggatgtgaactgtaccgaagtccccgtcgccattcatgccgatcagctgaccccgacttggcgggtatattcaaccggcagcaatgtctttcaaacaagggcgggttgtctcatcggagcggagcatgtaaataatagttatgaatgcgacatccccattggcgcggggatctgtgcttcatatcaaactcaaaccaattccccacggcggagacgatcagtagccagtcaatcaataattgcgtatacgatgagtcttggggcagaaaatagcgtggcttattctaataatagcatcgctatacctacaaattttacaatcagtgtaactaccgaaatccttcctgtcagcatgaccaaaactagcgtagattgcacgatgtatatttgcggagactcaactgagtgcagtaacctgttgttgcaatacggaagtttctgtacccagctgaaccgcgctcttacgggcattgcagtagaacaagataagaatacccaagaagtgtttgcccaggtgaaacaaatctacaagactcccccgattaaagactttggcgggttcaacttcagccagatattgcccgacccgtctcgtcgtagacggtcctttattgaagacctgctcttcaacaaggtcacactggctgatgcaggttttattaagcaatacggcgactgtcttggcgacatcgccgctagggaccttatatgtgctcagaaattcaatggtctgacagttctgccacccttgctcactgacgaaatgatcgctcaatatacaagcgccttgctggctgggactattacttccggatggacattcggggcgggtgccgccttgcaaattccttttgcaatgcaaatggcataccgtttcaacggaatcggcgtaacccagaatgtgctctatgaaaaccagaaattgatagcaaatcaatttaactcagccataggaaagattcaagactctctcagctcaaccgcgagtgctctcggcaagctccaagacgtagtaaatcaaaatgcacaagctttgaacactttggtaaagcaattgtcttccaacttcggggcgatctcatctggccctaacgacatcctgtcccggttgcccaaagtggaagccgaggtgcagatcgaccgcctcatcaccggccgacttcaatcactccaaacctacgtgactcaacaactgatccgggcagccgagataagggcgagtgcaaacttggcagctacgaaaatgtcagaatgtgttctcggccagagtaaacgggtagacttttgtgggaaaggttatcacttgatgtctttccctcaaagcgctcctcacggcgtcgtcttcttgcatgtgacttacgtgccagctcaagaaaagaacttcaccaccgcccctgctatatgccatgacggtaaagctcacttcccccgagagggcgtgttcgttagtaatggaacccattggtttgtgactcaacgaaacttttatgaacctcaaataattaccacggataacacttttgttagtggtaattgtgacgtggtgatcggcattgtgaataacacagtctacgatcctctgcaaccagaactggacagctttaaagaggaacttgacaaatatttcaagaaccatacaagccccgacgtcgacctgggcgacatcagtggaatcaatgcgtccgtagtcaatatccagaaggagattgatcggcttaatgaagtcgctaagaatttgaatgaaagtcttatagatctgcaagaactcgggaagtacgagcaatatattaaatggccttggtccggacgtagaaggcgcaggcggggctcaggcggttcagggtcagggtatattcccgaggcgccacgcgatgggcaagcgtacgtgcgtaaagatggcgaatgggtgttgctttccacattcttggggtgataa

SEQ ID NO: 108 - RNA, 3834 nt, Artificial Sequence
  WuS_DownDS3_D2P_Furin_pVax
gccaccauggacuggaccuggauacucuuucucguagcagcagccacacgagugcauucaauguucguuuuccucgugcucuugccuuugguuucuucucagugcguaaaccucacgacucgaacccaacugcccccagcuuauacaaauuccuuuacgcggggcgucuauuacccggauaagguuuucagauccagcgugcugcauaguacacaagaucucuuucuuccuuucuucucaaauguaaccugguuucacgcuauucauguauccggcaccaauggaacuaaaagauuugauaacccgguguugcccuucaaugaugguguguauuucgcuuccacggaaaagucaaacaucaucagaggguggauauucggcacaacauuggauuccaagugccagucacuccucauagugaacaaugcuacuaacgugguuauaaaggucugcgaauuucaauuuuguaaugauccuuuccucgguguuuacuaucacaagaacaauaaguccuggauggaaucagaauuccguguauacaguucugcgaacaauugcacauucgaauaugugucccaacccuuucucauggaucuggaagggaagcaggguaacuuuaagaaucugagagaauucguguucaagaacauugacugcuauuuuaaaaucuauagcaaacacaccccuauaaacuugguacgggauuugccucaaggauucucagcacucgaacccuuggucgauuugccaaucggcaucaauaucacccgguuucagacacuccuggcucuucaccgcuccuacuugacaccuggugauuccucaucugguuggaccgccggcgcagcggcauacuaugucggcuaucuucaaccaagaaccuucuugcugaaauauaaugagaacggaacuauaacugaugccguugauugugcccuugauccacuuagcgaaacaaagugcacucugaaguccuucacaguugaaaaggggaucuaccaaacauccaacuuccggguacaaccuacugaguccauagugcgauuuccuaacauuaccaaucugugcccauuuggagaaguauucaacgcaacuagguucgcguccguuuacgcguggaacaggaaaaggauuuccaauugcgucgccgacuauagcguucucuauaacagcgccucauuuagcacguuuaaguguuacgggguuaguccgaccaaacucaaugacuuguguuuuaccaaugucuaugcagacuccuuuguuauuagaggcgacgaggucagacaaauugcccccggacagacagguaagauugcagauuauaauuauaaacugccggacgacuucacgggguguguuauugcauggaacuccaauaaccuggacucuaaaguaggcgggaacuauaacuaucuguaucgccuguuucgcaaaucuaaccugaaacccuucugcagggacauauguacugaaauauaucaagcuggcagcacaccuuguaauggcgucgagggauucaauuguuacuucccacuucaaucuuacgguuuucagccuacuaacggcguaggguaucaacccuauagaguuguagugcucucuuucgaauugcuccaugcccccgcgacuguuuguggaccuaagaaguccacgaaccugguaaagaacaaguguguuaauuuuaauuuuaauggacugaccgggacuggagugcugacugaaaguaacaagaaauuucugccuuuccaacaauuuggccgcgauaucgcugauaccaccgacgccgucagagauccgcagacucucgaaauccuggacaucacgcccugcucauucggcgggguuagcguuauuacuccaggcacuaacacuagcaaucaaguugcaguucuguaccaggaugugaacuguaccgaaguccccgucgccauucaugccgaucagcugaccccgacuuggcggguauauucaaccggcagcaaugucuuucaaacaagggcggguugucucaucggagcggagcauguaaauaauaguuaugaaugcgacauccccauuggcgcggggaucugugcuucauaucaaacucaaaccaauuccccacggcggagacgaucaguagccagucaaucaauaauugcguauacgaugagucuuggggcagaaaauagcguggcuuauucuaauaauagcaucgcuauaccuacaaauuuuacaaucaguguaacuaccgaaauccuuccugucagcaugaccaaaacuagcguagauugcacgauguauauuugcggagacucaacugagugcaguaaccuguuguugcaauacggaaguuucuguacccagcugaaccgcgcucuuacgggcauugcaguagaacaagauaagaauacccaagaaguguuugcccaggugaaacaaaucuacaagacucccccgauuaaagacuuuggcggguucaacuucagccagauauugcccgacccgucucgucguagacgguccuuuauugaagaccugcucuucaacaaggucacacuggcugaugcagguuuuauuaagcaauacggcgacugucuuggcgacaucgccgcuagggaccuuauaugugcucagaaauucaauggucugacaguucugccacccuugcucacugacgaaaugaucgcucaauauacaagcgccuugcuggcugggacuauuacuuccggauggacauucggggcgggugccgccuugcaaauuccuuuugcaaugcaaauggcauaccguuucaacggaaucggcguaacccagaaugugcucuaugaaaaccagaaauugauagcaaaucaauuuaacucagccauaggaaagauucaagacucucucagcucaaccgcgagugcucucggcaagcuccaagacguaguaaaucaaaaugcacaagcuuugaacacuuugguaaagcaauugucuuccaacuucggggcgaucucaucuggcccuaacgacauccugucccgguugcccaaaguggaagccgaggugcagaucgaccgccucaucaccggccgacuucaaucacuccaaaccuacgugacucaacaacugauccgggcagccgagauaagggcgagugcaaacuuggcagcuacgaaaaugucagaauguguucucggccagaguaaacggguagacuuuugugggaaagguuaucacuugaugucuuucccucaaagcgcuccucacggcgucgucuucuugcaugugacuuacgugccagcucaagaaaagaacuucaccaccgccccugcuauaugccaugacgguaaagcucacuucccccgagagggcguguucguuaguaauggaacccauugguuugugacucaacgaaacuuuuaugaaccucaaauaauuaccacggauaacacuuuuguuagugguaauugugacguggugaucggcauugugaauaacacagucuacgauccucugcaaccagaacuggacagcuuuaaagaggaacuugacaaauauuucaagaaccauacaagccccgacgucgaccugggcgacaucaguggaaucaaugcguccguagucaauauccagaaggagauugaucggcuuaaugaagucgcuaagaauuugaaugaaagucuuauagaucugcaagaacucgggaaguacgagcaauauauuaaauggccuugguccggacguagaaggcgcaggcggggcucaggcgguucagggucaggguauauucccgaggcgccacgcgaugggcaagcguacgugcguaaagauggcgaauggguguugcuuuccacauucuuggggugauaa

SEQ ID NO: 109 - protein, 1274 aa, Artificial Sequence
  WuS_DownDS3_D2P_Furin_pVax
MDWTWILFLVAAATRVHSMFVFLVLLPLVSSQCVNLTTRTQLPPAYTNSFTRGVYYPDKVFRSSVLHSTQDLFLPFFSNVTWFHAIHVSGTNGTKRFDNPVLPFNDGVYFASTEKSNIIRGWIFGTTLDSKCQSLLIVNNATNVVIKVCEFQFCNDPFLGVYYHKNNKSWMESEFRVYSSANNCTFEYVSQPFLMDLEGKQGNFKNLREFVFKNIDCYFKIYSKHTPINLVRDLPQGFSALEPLVDLPIGINITRFQTLLALHRSYLTPGDSSSGWTAGAAAYYVGYLQPRTFLLKYNENGTITDAVDCALDPLSETKCTLKSFTVEKGIYQTSNFRVQPTESIVRFPNITNLCPFGEVFNATRFASVYAWNRKRISNCVADYSVLYNSASFSTFKCYGVSPTKLNDLCFTNVYADSFVIRGDEVRQIAPGQTGKIADYNYKLPDDFTGCVIAWNSNNLDSKVGGNYNYLYRLFRKSNLKPFCRDICTEIYQAGSTPCNGVEGFNCYFPLQSYGFQPTNGVGYQPYRVVVLSFELLHAPATVCGPKKSTNLVKNKCVNFNFNGLTGTGVLTESNKKFLPFQQFGRDIADTTDAVRDPQTLEILDITPCSFGGVSVITPGTNTSNQVAVLYQDVNCTEVPVAIHADQLTPTWRVYSTGSNVFQTRAGCLIGAEHVNNSYECDIPIGAGICASYQTQTNSPRRRRSVASQSIIAYTMSLGAENSVAYSNNSIAIPTNFTISVTTEILPVSMTKTSVDCTMYICGDSTECSNLLLQYGSFCTQLNRALTGIAVEQDKNTQEVFAQVKQIYKTPPIKDFGGFNFSQILPDPSRRRRSFIEDLLFNKVTLADAGFIKQYGDCLGDIAARDLICAQKFNGLTVLPPLLTDEMIAQYTSALLAGTITSGWTFGAGAALQIPFAMQMAYRFNGIGVTQNVLYENQKLIANQFNSAIGKIQDSLSSTASALGKLQDVVNQNAQALNTLVKQLSSNFGAISSGPNDILSRLPKVEAEVQIDRLITGRLQSLQTYVTQQLIRAAEIRASANLAATKMSECVLGQSKRVDFCGKGYHLMSFPQSAPHGVVFLHVTYVPAQEKNFTTAPAICHDGKAHFPREGVFVSNGTHWFVTQRNFYEPQIITTDNTFVSGNCDVVIGIVNNTVYDPLQPELDSFKEELDKYFKNHTSPDVDLGDISGINASVVNIQKEIDRLNEVAKNLNESLIDLQELGKYEQYIKWPWSGRRRRRRGSGGSGSGYIPEAPRDGQAYVRKDGEWVLLSTFLG

SEQ ID NO: 110 - DNA, 3816 bp, Artificial Sequence
  WuS_DownDS3_D2P_F_NoTriCle_pVax
gccaccatggactggacctggatactctttctcgtagcagcagccacacgagtgcattcaatgttcgtgttcctcgtgctcctgcctctcgttagcagccaatgtgttaatctcaccaccagaacacagctcccacccgcgtatactaactcttttacgaggggagtttattatcccgataaggttttccggtctagcgtactccactccacccaagatctgttcctgcctttctttagcaacgtgacgtggtttcatgcaatccacgtgagtggcaccaatggaaccaagcggttcgataatcctgtgttgccgtttaacgatggcgtgtattttgcctcaactgaaaagtctaacataatacgcggctggatcttcgggaccacattggatagtaagtgtcaatctctgcttatcgtgaacaacgctactaacgtcgttataaaggtctgtgagttccaattctgcaacgacccattcctgggtgtgtattaccacaagaataataaatcttggatggagtctgagtttcgcgtatactcttctgctaacaactgcacctttgaatatgtaagtcaaccattcctcatggatctggaaggaaaacaaggcaactttaagaacttgcgggaatttgtcttcaagaacatcgactgttattttaaaatttactcaaaacacaccccgattaatctggtccgcgatttgccccaagggttctctgcattggaaccccttgtggacttgcctataggaattaatatcacccgctttcaaactcttctggcgctgcaccgtagctacctgacaccaggagatagctctagtggctggactgctggagccgcggcatattatgtggggtatctgcagccacgtacatttctcctcaaatataatgaaaatggtacaataacggatgcagtcgactgcgcattggaccctctgagtgaaacaaaatgcactctcaagagcttcactgttgaaaagggcatataccaaacatctaattttagagtccaacccactgaatccattgtccgatttcctaatattacaaacctctgcccatttggagaagtgttcaacgccactaggtttgcatccgtgtacgcatggaacagaaaacgaatttctaattgtgtggcagactatagcgtgctgtataactcagcaagctttagcacatttaagtgttatggagttagcccaaccaaattgaatgatctttgtttcacgaacgtgtacgccgatagcttcgttattcgaggggacgaggtgaggcaaatcgctccaggtcaaaccggtaaaatcgccgattacaattataaacttcctgatgacttcactggctgtgtcatagcatggaactctaataatctcgacagcaaggtcggtgggaactataactatctttatcgactctttagaaagagtaatctcaaaccattttgcagagacatttgtacagagatttatcaggcagggagcacaccatgtaatggggtcgagggcttcaactgttacttccccctgcaatcttatgggttccagccgaccaatggagtgggctaccaaccttatcgcgtggtggtcctgtcttttgaactgcttcatgctccagccaccgtatgcggccctaagaagtctacaaatttggtcaagaacaagtgcgtcaattttaacttcaatggtctgactggaaccggtgtcctcacagaatctaacaagaaatttctgccatttcaacaatttggaagagatatcgcggatactacggatgctgttagggacccccaaacacttgaaattctcgacattacaccctgttcctttggcggggtcagtgtcattaccccgggtacaaatactagtaaccaagtcgcagtactgtatcaagatgttaattgtaccgaagtgccggtagcaatacacgctgatcaacttacaccaacatggcgagtgtattctacggggagtaatgtcttccaaacgcgggccgggtgtctgattggcgcggaacacgtaaacaactcctacgaatgtgatattccaataggcgcaggcatatgtgcgagctatcaaacacaaactaactcccctagacggcgtcggagtgtggctagtcaatcaatcattgcctatacaatgtctctgggagcagaaaacagcgtggcatattccaataattccatcgctatacctaccaactttaccatcagcgtcactactgagattcttcccgtctccatgacgaaaacttccgttgattgtactatgtacatctgcggagacagcaccgaatgcagtaaccttctcttgcaatatggcagcttttgtactcagctcaacagagctctcacaggtattgccgtcgaacaagataagaacacccaagaggtgttcgcccaggtgaaacagatatataagaccccacccatcaaggatttcggcgggtttaattttagtcaaatcctgcccgatccctcacggcgtcgcaggtcctttattgaagatcttctgttcaataaggtcacactcgctgacgcaggctttatcaagcagtatggagattgtctgggcgatatagctgcgagggacttgatctgcgcacaaaagttcaacggccttacagtgctgcccccgttgctgacagatgagatgattgcgcaatacacttccgcgcttctcgcagggaccatcacgagcggctggacgttcggcgctggcgccgctctgcaaatcccgtttgcaatgcaaatggcctataggtttaatggtatcggtgtaacgcaaaacgtactttatgaaaaccagaaactgatcgctaaccaattcaattccgctattggcaaaattcaagacagcctcagcagcacggctagtgcactgggtaaactccaagacgtggtgaaccaaaatgcccaagcattgaatacacttgtcaagcaacttagttccaacttcggtgcaatttcaagtggtccaaatgacatacttagcaggctgcctaaagtagaagccgaagtgcaaatcgatagacttatcaccggccgcctgcaatcccttcaaacatacgtgactcagcagcttatcagggctgctgagattcgagcaagtgcgaacctggccgccaccaaaatgagtgagtgcgtccttgggcaatccaagcgcgttgacttttgtggtaaggggtatcatctcatgagcttcccccaatccgcccctcacggagtagtgtttctccatgtgacgtatgttcctgcacaagagaagaacttcacaacggctccggctatatgtcatgacggaaaagcgcactttcctcgcgaaggagtgtttgtgtcaaatggaacgcactggttcgtgacgcaaaggaatttctacgagcctcaaatcatcactacagataatacttttgtctctgggaattgcgacgtggtcattggaatcgtcaacaatacggtttacgatcccctgcaaccagaactggattcattcaaagaagaactcgacaagtacttcaagaatcataccagtcctgatgtggatctgggcgatatcagtgggatcaatgcaagcgttgtcaacattcaaaaggaaatagaccgcctcaacgaagtcgcaaagaatctcaatgaaagccttattgatcttcaagagctcggaaaatatgagcaatatattaagtggccttggtccggcggctcaggcggaagtggctcaggatatattcctgaggctccccgagatggacaagcatacgtgagaaaagatggggagtgggtgttgctgagtacgttccttggatgataa

SEQ ID NO: 111 - RNA, 3816 nt, Artificial Sequence
  WuS_DownDS3_D2P_F_NoTriCle_pVax
gccaccauggacuggaccuggauacucuuucucguagcagcagccacacgagugcauucaauguucguguuccucgugcuccugccucucguuagcagccaauguguuaaucucaccaccagaacacagcucccacccgcguauacuaacucuuuuacgaggggaguuuauuaucccgauaagguuuuccggucuagcguacuccacuccacccaagaucuguuccugccuuucuuuagcaacgugacgugguuucaugcaauccacgugaguggcaccaauggaaccaagcgguucgauaauccuguguugccguuuaacgauggcguguauuuugccucaacugaaaagucuaacauaauacgcggcuggaucuucgggaccacauuggauaguaagugucaaucucugcuuaucgugaacaacgcuacuaacgucguuauaaaggucugugaguuccaauucugcaacgacccauuccuggguguguauuaccacaagaauaauaaaucuuggauggagucugaguuucgcguauacucuucugcuaacaacugcaccuuugaauauguaagucaaccauuccucauggaucuggaaggaaaacaaggcaacuuuaagaacuugcgggaauuugucuucaagaacaucgacuguuauuuuaaaauuuacucaaaacacaccccgauuaaucugguccgcgauuugccccaaggguucucugcauuggaaccccuuguggacuugccuauaggaauuaauaucacccgcuuucaaacucuucuggcgcugcaccguagcuaccugacaccaggagauagcucuaguggcuggacugcuggagccgcggcauauuaugugggguaucugcagccacguacauuucuccucaaauauaaugaaaaugguacaauaacggaugcagucgacugcgcauuggacccucugagugaaacaaaaugcacucucaagagcuucacuguugaaaagggcauauaccaaacaucuaauuuuagaguccaacccacugaauccauuguccgauuuccuaauauuacaaaccucugcccauuuggagaaguguucaacgccacuagguuugcauccguguacgcauggaacagaaaacgaauuucuaauuguguggcagacuauagcgugcuguauaacucagcaagcuuuagcacauuuaaguguuauggaguuagcccaaccaaauugaaugaucuuuguuucacgaacguguacgccgauagcuucguuauucgaggggacgaggugaggcaaaucgcuccaggucaaaccgguaaaaucgccgauuacaauuauaaacuuccugaugacuucacuggcugugucauagcauggaacucuaauaaucucgacagcaaggucggugggaacuauaacuaucuuuaucgacucuuuagaaagaguaaucucaaaccauuuugcagagacauuuguacagagauuuaucaggcagggagcacaccauguaauggggucgagggcuucaacuguuacuucccccugcaaucuuauggguuccagccgaccaauggagugggcuaccaaccuuaucgcguggugguccugucuuuugaacugcuucaugcuccagccaccguaugcggcccuaagaagucuacaaauuuggucaagaacaagugcgucaauuuuaacuucaauggucugacuggaaccgguguccucacagaaucuaacaagaaauuucugccauuucaacaauuuggaagagauaucgcggauacuacggaugcuguuagggacccccaaacacuugaaauucucgacauuacacccuguuccuuuggcggggucagugucauuaccccggguacaaauacuaguaaccaagucgcaguacuguaucaagauguuaauuguaccgaagugccgguagcaauacacgcugaucaacuuacaccaacauggcgaguguauucuacggggaguaaugucuuccaaacgcgggccgggugucugauuggcgcggaacacguaaacaacuccuacgaaugugauauuccaauaggcgcaggcauaugugcgagcuaucaaacacaaacuaacuccccuagacggcgucggaguguggcuagucaaucaaucauugccuauacaaugucucugggagcagaaaacagcguggcauauuccaauaauuccaucgcuauaccuaccaacuuuaccaucagcgucacuacugagauucuucccgucuccaugacgaaaacuuccguugauuguacuauguacaucugcggagacagcaccgaaugcaguaaccuucucuugcaauauggcagcuuuuguacucagcucaacagagcucucacagguauugccgucgaacaagauaagaacacccaagagguguucgcccaggugaaacagauauauaagaccccacccaucaaggauuucggcggguuuaauuuuagucaaauccugcccgaucccucacggcgucgcagguccuuuauugaagaucuucuguucaauaaggucacacucgcugacgcaggcuuuaucaagcaguauggagauugucugggcgauauagcugcgagggacuugaucugcgcacaaaaguucaacggccuuacagugcugcccccguugcugacagaugagaugauugcgcaauacacuuccgcgcuucucgcagggaccaucacgagcggcuggacguucggcgcuggcgccgcucugcaaaucccguuugcaaugcaaauggccuauagguuuaaugguaucgguguaacgcaaaacguacuuuaugaaaaccagaaacugaucgcuaaccaauucaauuccgcuauuggcaaaauucaagacagccucagcagcacggcuagugcacuggguaaacuccaagacguggugaaccaaaaugcccaagcauugaauacacuugucaagcaacuuaguuccaacuucggugcaauuucaagugguccaaaugacauacuuagcaggcugccuaaaguagaagccgaagugcaaaucgauagacuuaucaccggccgccugcaaucccuucaaacauacgugacucagcagcuuaucagggcugcugagauucgagcaagugcgaaccuggccgccaccaaaaugagugagugcguccuugggcaauccaagcgcguugacuuuugugguaagggguaucaucucaugagcuucccccaauccgccccucacggaguaguguuucuccaugugacguauguuccugcacaagagaagaacuucacaacggcuccggcuauaugucaugacggaaaagcgcacuuuccucgcgaaggaguguuugugucaaauggaacgcacugguucgugacgcaaaggaauuucuacgagccucaaaucaucacuacagauaauacuuuugucucugggaauugcgacguggucauuggaaucgucaacaauacgguuuacgauccccugcaaccagaacuggauucauucaaagaagaacucgacaaguacuucaagaaucauaccaguccugauguggaucugggcgauaucagugggaucaaugcaagcguugucaacauucaaaaggaaauagaccgccucaacgaagucgcaaagaaucucaaugaaagccuuauugaucuucaagagcucggaaaauaugagcaauauauuaaguggccuugguccggcggcucaggcggaaguggcucaggauauauuccugaggcuccccgagauggacaagcauacgugagaaaagauggggaguggguguugcugaguacguuccuuggaugauaa

SEQ ID NO: 112 - protein, 1268 aa, Artificial Sequence
  WuS_DownDS3_D2P_F_NoTriCle_pVax
MDWTWILFLVAAATRVHSMFVFLVLLPLVSSQCVNLTTRTQLPPAYTNSFTRGVYYPDKVFRSSVLHSTQDLFLPFFSNVTWFHAIHVSGTNGTKRFDNPVLPFNDGVYFASTEKSNIIRGWIFGTTLDSKCQSLLIVNNATNVVIKVCEFQFCNDPFLGVYYHKNNKSWMESEFRVYSSANNCTFEYVSQPFLMDLEGKQGNFKNLREFVFKNIDCYFKIYSKHTPINLVRDLPQGFSALEPLVDLPIGINITRFQTLLALHRSYLTPGDSSSGWTAGAAAYYVGYLQPRTFLLKYNENGTITDAVDCALDPLSETKCTLKSFTVEKGIYQTSNFRVQPTESIVRFPNITNLCPFGEVFNATRFASVYAWNRKRISNCVADYSVLYNSASFSTFKCYGVSPTKLNDLCFTNVYADSFVIRGDEVRQIAPGQTGKIADYNYKLPDDFTGCVIAWNSNNLDSKVGGNYNYLYRLFRKSNLKPFCRDICTEIYQAGSTPCNGVEGFNCYFPLQSYGFQPTNGVGYQPYRVVVLSFELLHAPATVCGPKKSTNLVKNKCVNFNFNGLTGTGVLTESNKKFLPFQQFGRDIADTTDAVRDPQTLEILDITPCSFGGVSVITPGTNTSNQVAVLYQDVNCTEVPVAIHADQLTPTWRVYSTGSNVFQTRAGCLIGAEHVNNSYECDIPIGAGICASYQTQTNSPRRRRSVASQSIIAYTMSLGAENSVAYSNNSIAIPTNFTISVTTEILPVSMTKTSVDCTMYICGDSTECSNLLLQYGSFCTQLNRALTGIAVEQDKNTQEVFAQVKQIYKTPPIKDFGGFNFSQILPDPSRRRRSFIEDLLFNKVTLADAGFIKQYGDCLGDIAARDLICAQKFNGLTVLPPLLTDEMIAQYTSALLAGTITSGWTFGAGAALQIPFAMQMAYRFNGIGVTQNVLYENQKLIANQFNSAIGKIQDSLSSTASALGKLQDVVNQNAQALNTLVKQLSSNFGAISSGPNDILSRLPKVEAEVQIDRLITGRLQSLQTYVTQQLIRAAEIRASANLAATKMSECVLGQSKRVDFCGKGYHLMSFPQSAPHGVVFLHVTYVPAQEKNFTTAPAICHDGKAHFPREGVFVSNGTHWFVTQRNFYEPQIITTDNTFVSGNCDVVIGIVNNTVYDPLQPELDSFKEELDKYFKNHTSPDVDLGDISGINASVVNIQKEIDRLNEVAKNLNESLIDLQELGKYEQYIKWPWSGGSGGSGSGYIPEAPRDGQAYVRKDGEWVLLSTFLG

SEQ ID NO: 113 - DNA, 3774 bp, Artificial Sequence
  WuS_DownDS2_2P_pVax
gccaccatggactggacctggatactctttctcgtagcagcagccacacgagtgcattcaatgttcgtgttcttggtgctgctgcctcttgtctcatcacagtgcgttaatctgaccacccgtacacaactcccacccgcatacacaaatagctttacacgcggagtgtattaccccgataaagtctttcggagctcagtgctccattctactcaagatcttttcctgccgttctttagtaacgttacttggtttcatgcaatacatgtgtctggcacaaacggaaccaaacgttttgataatccggtgttgccatttaatgatggtgtatattttgcttccacggaaaagtcaaacatcatccgtgggtggatctttggcaccactcttgatagcaaatgtcaaagccttctgattgttaataacgctacaaacgtcgtaattaaagtgtgtgaattccagttctgtaatgaccccttcctcggagtatattaccacaagaataacaaatcttggatggagagcgaatttagagtttacagttcagccaataactgtacatttgaatatgtcagtcagcctttcctcatggacctcgaaggtaaacaaggtaattttaagaacttgagagagttcgtgtttaagaacatcgatggctatttcaaaatttactctaagcacacaccaatcaacctggttcgagacctgccccagggtttctcagctttggaaccattggtggacctgccaatcggcattaacattaccagatttcaaactttgttggcactccaccggtcatatcttacccccggagacagttcctcaggctggacggcaggcgccgccgcgtactatgttgggtatctccaaccccgaaccttccttctcaaatacaatgaaaacgggacgattacagatgcagtcgattgcgccctggaccccttgtccgaaactaaatgcactctgaagagtttcacggtagagaagggaatctatcaaacgagcaattttcgagtccaaccaacggaatctattgtgcggtttcccaatatcacaaacctctgtccattcggagaagtctttaatgctaccaggtttgcgtctgtatatgcatggaaccgaaagaggatttccaattgcgtagcggactacagtgtcctttataacagcgcttcattttccacgtttaagtgttatggtgtttctccaacgaaactcaacgacctctgttttactaacgtttacgctgacagctttgttatacgtggggacgaagtcaggcaaattgctcctggacagactggaaagatcgctgattataattataaacttcctgacgatttcaccggctgcgttattgcatggaactccaacaatctggattcaaaagtgggtggaaattataattatctgtataggttgtttcggaagagcaatcttaagccctttgagcgggacatatgtaccgaaatttaccaagcaggctccaccccatgcaatggagtagaagggttcaattgctattttcctctgcaaagttatggctttcaacccaccaacggagttgggtatcaaccttacagggttgtcgtgctgagtttcgaattgctccacgcacccgctacagtatgtggccccaagaagtccactaatcttgttaagaataaatgcgtgaacttcaacttcaatggacttacaggtactggagtactcacggaatcaaacaagaaatttctcccatttcaacagtttggccgagatatagctgacaccacagatgctgttcgcgacccccagacgttggaaatacttgatatcactccctgcagcttcggcggcgtgagcgtgatcactccaggtactaatacgagcaatcaagttgccgttctgtaccaagatgtgaactgcaccgaggttccagtggcaattcacgccgaccaacttactcccacctggcgggtctattccaccggatcaaacgtcttccaaactcgcgctggttgccttatcggtgcagagcacgttaataattcctatgaatgtgacattcccataggagcaggcatctgtgcatcttatcaaacccagactaattcccctggttccgcttcctctgttgcatcccagtccataattgcctacactatgagtctcggggctgaaaattccgtggcctattctaataattcaatcgccatcccaaccaattttaccatatccgtaacgactgaaatacttcctgtcagtatgaccaagacctcagtggactgcaccatgtacatctgcggcgattctactgaatgttccaatctgcttttgcaatatggttcattctgcacccaactcaacagggctcttacagggatcgccgtcgaacaggataagaatacccaggaagtgttcgcccaagttaagcaaatttacaagacaccacccatcaaggacttcggcgggttcaacttcagccaaattctgcccgacccgtctaagccttctaagcgctctttcattgaggatcttttgttcaataaggttacgcttgccgatgcagggtttatcaaacagtatggcgactgtcttggggatatcgcagctagggatcttatttgtgcacagaaatttaatggcctgactgttcttccccctttgctcactgacgagatgattgcccagtacacttcagctctcctggccgggactataacttctggttggaccttcggagctggcgccgccctgcaaattccatttgcaatgcagatggcttatcgcttcaacggaattggggtgacccaaaatgttctctacgagaaccagaaactcattgcaaaccagttcaattctgcgatcgggaagatccaggattccctgtctagtacggctagtgccctcggtaagctccaagacgtcgtcaaccaaaacgcccaggccttgaacacccttgtcaaacaactgagctccaattttggggctattagcagtgtgctgaatgatatcctgtcccgccttgacccaccggaagcggaagtccaaattgatcgactgatcactgggcgtctccaatcccttcaaacttacgtgacccaacaactcatccgagcagctgagattagggctagcgctaaccttgctgctactaagatgtcagagtgtgtcctcggccagtctaagagagtggacttttgtgggaaagggtaccacttgatgtcattcccacaaagcgccccacacggcgtggtgtttctccacgtcacttacgttccagctcaggaaaagaactttaccaccgcccccgctatatgtcatgatgggaaggcccactttcctcgtgaaggtgtctttgtcagcaatggcacacactggtttgtgacccaacggaatttctatgagcctcagattattaccacggataacactttcgtatcagggaattgtgatgtggttatcggcatcgttaataatacagtgtatgacccactgcagccagagcttgacagcttcaaagaagagctcgataagtactttaagaatcatacaagtcctgacgttgatcttggggatattagtgggattaacgccagcgtcgtcaatattcagaaagagattgacaggttgaacgaagtagctaagaatcttaatgaaagcctgatagatttgcaagaacttggtaagtatgagcaggggtacatacccgaggctcctcgggatgggcaggcctatgtacgcaaagacggtgaatgggtattgctcagcacttttctcggctgataa

SEQ ID NO: 114 - RNA, 3774 nt, Artificial Sequence
  WuS_DownDS2_2P_pVax
gccaccauggacuggaccuggauacucuuucucguagcagcagccacacgagugcauucaauguucguguucuuggugcugcugccucuugucucaucacagugcguuaaucugaccacccguacacaacucccacccgcauacacaaauagcuuuacacgcggaguguauuaccccgauaaagucuuucggagcucagugcuccauucuacucaagaucuuuuccugccguucuuuaguaacguuacuugguuucaugcaauacaugugucuggcacaaacggaaccaaacguuuugauaauccgguguugccauuuaaugaugguguauauuuugcuuccacggaaaagucaaacaucauccguggguggaucuuuggcaccacucuugauagcaaaugucaaagccuucugauuguuaauaacgcuacaaacgucguaauuaaagugugugaauuccaguucuguaaugaccccuuccucggaguauauuaccacaagaauaacaaaucuuggauggagagcgaauuuagaguuuacaguucagccaauaacuguacauuugaauaugucagucagccuuuccucauggaccucgaagguaaacaagguaauuuuaagaacuugagagaguucguguuuaagaacaucgauggcuauuucaaaauuuacucuaagcacacaccaaucaaccugguucgagaccugccccaggguuucucagcuuuggaaccauugguggaccugccaaucggcauuaacauuaccagauuucaaacuuuguuggcacuccaccggucauaucuuacccccggagacaguuccucaggcuggacggcaggcgccgccgcguacuauguuggguaucuccaaccccgaaccuuccuucucaaauacaaugaaaacgggacgauuacagaugcagucgauugcgcccuggaccccuuguccgaaacuaaaugcacucugaagaguuucacgguagagaagggaaucuaucaaacgagcaauuuucgaguccaaccaacggaaucuauugugcgguuucccaauaucacaaaccucuguccauucggagaagucuuuaaugcuaccagguuugcgucuguauaugcauggaaccgaaagaggauuuccaauugcguagcggacuacaguguccuuuauaacagcgcuucauuuuccacguuuaaguguuaugguguuucuccaacgaaacucaacgaccucuguuuuacuaacguuuacgcugacagcuuuguuauacguggggacgaagucaggcaaauugcuccuggacagacuggaaagaucgcugauuauaauuauaaacuuccugacgauuucaccggcugcguuauugcauggaacuccaacaaucuggauucaaaaguggguggaaauuauaauuaucuguauagguuguuucggaagagcaaucuuaagcccuuugagcgggacauauguaccgaaauuuaccaagcaggcuccaccccaugcaauggaguagaaggguucaauugcuauuuuccucugcaaaguuauggcuuucaacccaccaacggaguuggguaucaaccuuacaggguugucgugcugaguuucgaauugcuccacgcacccgcuacaguauguggccccaagaaguccacuaaucuuguuaagaauaaaugcgugaacuucaacuucaauggacuuacagguacuggaguacucacggaaucaaacaagaaauuucucccauuucaacaguuuggccgagauauagcugacaccacagaugcuguucgcgacccccagacguuggaaauacuugauaucacucccugcagcuucggcggcgugagcgugaucacuccagguacuaauacgagcaaucaaguugccguucuguaccaagaugugaacugcaccgagguuccaguggcaauucacgccgaccaacuuacucccaccuggcgggucuauuccaccggaucaaacgucuuccaaacucgcgcugguugccuuaucggugcagagcacguuaauaauuccuaugaaugugacauucccauaggagcaggcaucugugcaucuuaucaaacccagacuaauuccccugguuccgcuuccucuguugcaucccaguccauaauugccuacacuaugagucucggggcugaaaauuccguggccuauucuaauaauucaaucgccaucccaaccaauuuuaccauauccguaacgacugaaauacuuccugucaguaugaccaagaccucaguggacugcaccauguacaucugcggcgauucuacugaauguuccaaucugcuuuugcaauaugguucauucugcacccaacucaacagggcucuuacagggaucgccgucgaacaggauaagaauacccaggaaguguucgcccaaguuaagcaaauuuacaagacaccacccaucaaggacuucggcggguucaacuucagccaaauucugcccgacccgucuaagccuucuaagcgcucuuucauugaggaucuuuuguucaauaagguuacgcuugccgaugcaggguuuaucaaacaguauggcgacugucuuggggauaucgcagcuagggaucuuauuugugcacagaaauuuaauggccugacuguucuucccccuuugcucacugacgagaugauugcccaguacacuucagcucuccuggccgggacuauaacuucugguuggaccuucggagcuggcgccgcccugcaaauuccauuugcaaugcagauggcuuaucgcuucaacggaauuggggugacccaaaauguucucuacgagaaccagaaacucauugcaaaccaguucaauucugcgaucgggaagauccaggauucccugucuaguacggcuagugcccucgguaagcuccaagacgucgucaaccaaaacgcccaggccuugaacacccuugucaaacaacugagcuccaauuuuggggcuauuagcagugugcugaaugauauccugucccgccuugacccaccggaagcggaaguccaaauugaucgacugaucacugggcgucuccaaucccuucaaacuuacgugacccaacaacucauccgagcagcugagauuagggcuagcgcuaaccuugcugcuacuaagaugucagaguguguccucggccagucuaagagaguggacuuuugugggaaaggguaccacuugaugucauucccacaaagcgccccacacggcgugguguuucuccacgucacuuacguuccagcucaggaaaagaacuuuaccaccgcccccgcuauaugucaugaugggaaggcccacuuuccucgugaaggugucuuugucagcaauggcacacacugguuugugacccaacggaauuucuaugagccucagauuauuaccacggauaacacuuucguaucagggaauugugaugugguuaucggcaucguuaauaauacaguguaugacccacugcagccagagcuugacagcuucaaagaagagcucgauaaguacuuuaagaaucauacaaguccugacguugaucuuggggauauuagugggauuaacgccagcgucgucaauauucagaaagagauugacagguugaacgaaguagcuaagaaucuuaaugaaagccugauagauuugcaagaacuugguaaguaugagcagggguacauacccgaggcuccucgggaugggcaggccuauguacgcaaagacggugaauggguauugcucagcacuuuucucggcugauaa

SEQ ID NO: 115 - protein, 1254 aa, Artificial Sequence
  WuS_DownDS2_2P_pVax
MDWTWILFLVAAATRVHSMFVFLVLLPLVSSQCVNLTTRTQLPPAYTNSFTRGVYYPDKVFRSSVLHSTQDLFLPFFSNVTWFHAIHVSGTNGTKRFDNPVLPFNDGVYFASTEKSNIIRGWIFGTTLDSKCQSLLIVNNATNVVIKVCEFQFCNDPFLGVYYHKNNKSWMESEFRVYSSANNCTFEYVSQPFLMDLEGKQGNFKNLREFVFKNIDGYFKIYSKHTPINLVRDLPQGFSALEPLVDLPIGINITRFQTLLALHRSYLTPGDSSSGWTAGAAAYYVGYLQPRTFLLKYNENGTITDAVDCALDPLSETKCTLKSFTVEKGIYQTSNFRVQPTESIVRFPNITNLCPFGEVFNATRFASVYAWNRKRISNCVADYSVLYNSASFSTFKCYGVSPTKLNDLCFTNVYADSFVIRGDEVRQIAPGQTGKIADYNYKLPDDFTGCVIAWNSNNLDSKVGGNYNYLYRLFRKSNLKPFERDICTEIYQAGSTPCNGVEGFNCYFPLQSYGFQPTNGVGYQPYRVVVLSFELLHAPATVCGPKKSTNLVKNKCVNFNFNGLTGTGVLTESNKKFLPFQQFGRDIADTTDAVRDPQTLEILDITPCSFGGVSVITPGTNTSNQVAVLYQDVNCTEVPVAIHADQLTPTWRVYSTGSNVFQTRAGCLIGAEHVNNSYECDIPIGAGICASYQTQTNSPGSASSVASQSIIAYTMSLGAENSVAYSNNSIAIPTNFTISVTTEILPVSMTKTSVDCTMYICGDSTECSNLLLQYGSFCTQLNRALTGIAVEQDKNTQEVFAQVKQIYKTPPIKDFGGFNFSQILPDPSKPSKRSFIEDLLFNKVTLADAGFIKQYGDCLGDIAARDLICAQKFNGLTVLPPLLTDEMIAQYTSALLAGTITSGWTFGAGAALQIPFAMQMAYRFNGIGVTQNVLYENQKLIANQFNSAIGKIQDSLSSTASALGKLQDVVNQNAQALNTLVKQLSSNFGAISSVLNDILSRLDPPEAEVQIDRLITGRLQSLQTYVTQQLIRAAEIRASANLAATKMSECVLGQSKRVDFCGKGYHLMSFPQSAPHGVVFLHVTYVPAQEKNFTTAPAICHDGKAHFPREGVFVSNGTHWFVTQRNFYEPQIITTDNTFVSGNCDVVIGIVNNTVYDPLQPELDSFKEELDKYFKNHTSPDVDLGDISGINASVVNIQKEIDRLNEVAKNLNESLIDLQELGKYEQGYIPEAPRDGQAYVRKDGEWVLLSTFLG

SEQ ID NO: 116 - DNA, 3774 bp, Artificial Sequence
  WuS_DownDS1_2P_pVax
gccaccatggactggacctggatactctttctcgtagcagcagccacacgagtgcattcaatgtttgttttccttgttctgctcccgcttgtgtcttcccagtgcgtgaacctgaccacccgaactcaactcccaccagcatacaccaactcatttacaagaggagtttattacccggacaaggtatttcgaagttcagttcttcacagcacccaagacctgtttctgccattcttcagtaatgtcacttggtttcacgcgatacatgtcagcggtacaaacgggacaaagcgattcgataacccagtactcccattcaacgacggagtgtattttgcatctacagagaaatccaacattatacgcgggtggatctttggaactactctggactccaagacacagagcctgctcattgtgaacaatgcaacgaatgtcgtcataaaagtctgtgaatttcaattttgcaacgatcctttcctcggagtctattaccataagaacaataagagttggatggagagtgagtttcgcgtctattcttccgcgaacaattgtacatttgaatatgtatcacaaccctttcttatggatttggaaggcaaacaaggtaacttcaagaacttgcgcgagttcgtgttcaagaacatagactgttattttaagatctatagtaagcatacgccaatcaatctggtgcgagatttgcctcagggcttttctgctcttgaacccttggttgatctgcccatcgggatcaacataaccagatttcaaacgttgctcgcactccaccgcagctatctcactcctggcgattcctcatctgggtggaccgccggagctgctgcttattacgtcggctatctccagccgcgtactttcctgctcaagtataatgagaatggcaccattaccgatgctgtggattgtgctcttgatccactctctgaaaccaaatgcactctcaagtcttttaccgtggaaaagggtatttatcagacatctaattttcgggtgcaacctactgagtcaattgtacggtttcctaacataactaacctttgtccatttggggaagtcttcaatgccacgcggttcgcatcagtctatgcatggaacagaaaacgtatctccaactgcgtcgccgattattccgtcctttacaatagcgctagcttttccacattcaaatgttatggcgtatcaccaaccaaacttaacgatctctgctttactaatgtctacgctgactctttcgttattcgaggtgacgaggtgcgccaaattgcgcctggtcaaaccggaaagattgccgattataactacaagctccccgacgactttacgggttgtgtgatcgcctggaatagcaataacctcgattctaaagttggcggtaattataactatctgtacagactctttaggaaaagtaatctcaagcccttttgcagggatatctcaaccgaaatctaccaagccggcagcactccttgcaatggtgtcgaggggtttaattgttatttcccactgcaatcttacggctttcaaccgactaatggagtcggttatcaaccctatagggtggtggtactctcctttgaacttttgcacgctccggcaacagtttgtggaccaaagaaaagtacgaaccttgttaagaataagtgtgttaatttcaattttaacggcctcactggaacaggtgtcctcacagaaagcaacaagaagtttctccctttccaacagtttggacgggatatcgccgacactactgacgccgtcagagatcctcaaactctcgaaatcttggatatcacaccatgttctttcggtggtgtctccgtcataacaccaggaactaacacctctaatcaagtggccgtgctctatcaggacgtcaattgcacagaagtgcctgtcgcaatccatgctgatcagctcactcccacctggcgtgtgtattccactggctctaatgtctttcagacacgggcaggttgccttattggggcagagcatgtgaacaattcctacgaatgcgatatacccattggggcaggcatttgcgccagctaccaaacccaaactaacagccccgggagtgccagcagcgtggcatctcagtccattattgcctatacgatgagcctgggtgctgaaaatagcgtggcttatagtaataactctatcgccatacccacaaacttcaccatttcagtgaccaccgaaatccttcctgtttctatgaccaaaacgtccgtcgattgtacaatgtacatttgcggcgatagcactgaatgttcaaacctgctcctgcaatacggctctttctgtactcagctcaaccgggcactcaccggcatagccgtcgaacaagacaagaatacccaggaagtctttgcgcaggtgaaacaaatctataagaccccaccaataaaagatttcggcggttttaatttcagccaaatcttgcctgatcccagcaagccatctaaacggtctttcattgaagatctcctgttcaacaaggttacgctggctgacgccgggtttattaagcaatatggcgattgccttggggacattgccgcacgagacctcatttgtgcccagaaattcaacgggctcaccgtattgcccccgctcctcacagacgaaatgatcgcccaatatacaagcgccctgcttgcgggaaccattacaagcggttggacctttggtgccggcgcagctctgcaaatacccttcgcaatgcaaatggcatatcggtttaatggaattggcgtaacccaaaacgtgctgtatgaaaaccagaaactgatcgcaaatcaattcaatagtgctataggaaagatccaagacagtctgtcttccactgctagcgcgctggggaagctccaagacgttgtgaaccaaaacgcgcaggccctgaataccctggtgaagcaactttcaagcaatttcggtgctatatcttctgtcctcaatgacattctctctcggctcgatcccccggaagccgaagttcagatagaccgtttgatcacaggccgcttgcaatccctgcaaacctacgttacacaacaactgattcgcgccgccgaaattcgggcatccgccaatctggccgcaaccaaaatgtccgagtgtgttctcggtcaatccaaacgcgtggatttctgcggaaaaggataccatttgatgtcatttccacaatcagctccacacggtgttgtattcctgcacgtgacctacgtgccagcccaggagaagaattttactactgcgcccgccatttgtcatgacgggaaggctcattttcctcgggaaggggttttcgtctcaaacggtacccattggttcgtgactcagaggaacttttatgaacctcaaatcataacgaccgataacacgtttgtaagtggcaattgcgacgtggtcatcgggattgtaaacaatactgtctatgaccctctccaaccagagcttgacagctttaaagaagagcttgataaatactttaagaaccatacctcaccagacgtcgatttgggagatatcagtggcattaatgcctctgtcgtcaatatccagaaagagattgaccgcttgaacgaagttgccaagaatcttaatgagtctctgattgacttgcaagaattgggaaaatatgaacaaggatatattccagaagcccctcgcgatgggcaagcatatgttcgaaaggatggggaatgggtgctgctcagcacctttctcggttgataa

SEQ ID NO: 117 - RNA, 3774 nt, Artificial Sequence
  WuS_DownDS1_2P_pVax
gccaccauggacuggaccuggauacucuuucucguagcagcagccacacgagugcauucaauguuuguuuuccuuguucugcucccgcuugugucuucccagugcgugaaccugaccacccgaacucaacucccaccagcauacaccaacucauuuacaagaggaguuuauuacccggacaagguauuucgaaguucaguucuucacagcacccaagaccuguuucugccauucuucaguaaugucacuugguuucacgcgauacaugucagcgguacaaacgggacaaagcgauucgauaacccaguacucccauucaacgacggaguguauuuugcaucuacagagaaauccaacauuauacgcggguggaucuuuggaacuacucuggacuccaagacacagagccugcucauugugaacaaugcaacgaaugucgucauaaaagucugugaauuucaauuuugcaacgauccuuuccucggagucuauuaccauaagaacaauaagaguuggauggagagugaguuucgcgucuauucuuccgcgaacaauuguacauuugaauauguaucacaacccuuucuuauggauuuggaaggcaaacaagguaacuucaagaacuugcgcgaguucguguucaagaacauagacuguuauuuuaagaucuauaguaagcauacgccaaucaaucuggugcgagauuugccucagggcuuuucugcucuugaacccuugguugaucugcccaucgggaucaacauaaccagauuucaaacguugcucgcacuccaccgcagcuaucucacuccuggcgauuccucaucuggguggaccgccggagcugcugcuuauuacgucggcuaucuccagccgcguacuuuccugcucaaguauaaugagaauggcaccauuaccgaugcuguggauugugcucuugauccacucucugaaaccaaaugcacucucaagucuuuuaccguggaaaaggguauuuaucagacaucuaauuuucgggugcaaccuacugagucaauuguacgguuuccuaacauaacuaaccuuuguccauuuggggaagucuucaaugccacgcgguucgcaucagucuaugcauggaacagaaaacguaucuccaacugcgucgccgauuauuccguccuuuacaauagcgcuagcuuuuccacauucaaauguuauggcguaucaccaaccaaacuuaacgaucucugcuuuacuaaugucuacgcugacucuuucguuauucgaggugacgaggugcgccaaauugcgccuggucaaaccggaaagauugccgauuauaacuacaagcuccccgacgacuuuacggguugugugaucgccuggaauagcaauaaccucgauucuaaaguuggcgguaauuauaacuaucuguacagacucuuuaggaaaaguaaucucaagcccuuuugcagggauaucucaaccgaaaucuaccaagccggcagcacuccuugcaauggugucgagggguuuaauuguuauuucccacugcaaucuuacggcuuucaaccgacuaauggagucgguuaucaacccuauaggguggugguacucuccuuugaacuuuugcacgcuccggcaacaguuuguggaccaaagaaaaguacgaaccuuguuaagaauaaguguguuaauuucaauuuuaacggccucacuggaacagguguccucacagaaagcaacaagaaguuucucccuuuccaacaguuuggacgggauaucgccgacacuacugacgccgucagagauccucaaacucucgaaaucuuggauaucacaccauguucuuucgguggugucuccgucauaacaccaggaacuaacaccucuaaucaaguggccgugcucuaucaggacgucaauugcacagaagugccugucgcaauccaugcugaucagcucacucccaccuggcguguguauuccacuggcucuaaugucuuucagacacgggcagguugccuuauuggggcagagcaugugaacaauuccuacgaaugcgauauacccauuggggcaggcauuugcgccagcuaccaaacccaaacuaacagccccgggagugccagcagcguggcaucucaguccauuauugccuauacgaugagccugggugcugaaaauagcguggcuuauaguaauaacucuaucgccauacccacaaacuucaccauuucagugaccaccgaaauccuuccuguuucuaugaccaaaacguccgucgauuguacaauguacauuugcggcgauagcacugaauguucaaaccugcuccugcaauacggcucuuucuguacucagcucaaccgggcacucaccggcauagccgucgaacaagacaagaauacccaggaagucuuugcgcaggugaaacaaaucuauaagaccccaccaauaaaagauuucggcgguuuuaauuucagccaaaucuugccugaucccagcaagccaucuaaacggucuuucauugaagaucuccuguucaacaagguuacgcuggcugacgccggguuuauuaagcaauauggcgauugccuuggggacauugccgcacgagaccucauuugugcccagaaauucaacgggcucaccguauugcccccgcuccucacagacgaaaugaucgcccaauauacaagcgcccugcuugcgggaaccauuacaagcgguuggaccuuuggugccggcgcagcucugcaaauacccuucgcaaugcaaauggcauaucgguuuaauggaauuggcguaacccaaaacgugcuguaugaaaaccagaaacugaucgcaaaucaauucaauagugcuauaggaaagauccaagacagucugucuuccacugcuagcgcgcuggggaagcuccaagacguugugaaccaaaacgcgcaggcccugaauacccuggugaagcaacuuucaagcaauuucggugcuauaucuucuguccucaaugacauucucucucggcucgaucccccggaagccgaaguucagauagaccguuugaucacaggccgcuugcaaucccugcaaaccuacguuacacaacaacugauucgcgccgccgaaauucgggcauccgccaaucuggccgcaaccaaaauguccgaguguguucucggucaauccaaacgcguggauuucugcggaaaaggauaccauuugaugucauuuccacaaucagcuccacacgguguuguauuccugcacgugaccuacgugccagcccaggagaagaauuuuacuacugcgcccgccauuugucaugacgggaaggcucauuuuccucgggaagggguuuucgucucaaacgguacccauugguucgugacucagaggaacuuuuaugaaccucaaaucauaacgaccgauaacacguuuguaaguggcaauugcgacguggucaucgggauuguaaacaauacugucuaugacccucuccaaccagagcuugacagcuuuaaagaagagcuugauaaauacuuuaagaaccauaccucaccagacgucgauuugggagauaucaguggcauuaaugccucugucgucaauauccagaaagagauugaccgcuugaacgaaguugccaagaaucuuaaugagucucugauugacuugcaagaauugggaaaauaugaacaaggauauauuccagaagccccucgcgaugggcaagcauauguucgaaaggauggggaaugggugcugcucagcaccuuucucgguugauaa

SEQ ID NO: 118 - protein, 1254 aa, Artificial Sequence
  WuS_DownDS1_2P_pVax
MDWTWILFLVAAATRVHSMFVFLVLLPLVSSQCVNLTTRTQLPPAYTNSFTRGVYYPDKVFRSSVLHSTQDLFLPFFSNVTWFHAIHVSGTNGTKRFDNPVLPFNDGVYFASTEKSNIIRGWIFGTTLDSKTQSLLIVNNATNVVIKVCEFQFCNDPFLGVYYHKNNKSWMESEFRVYSSANNCTFEYVSQPFLMDLEGKQGNFKNLREFVFKNIDCYFKIYSKHTPINLVRDLPQGFSALEPLVDLPIGINITRFQTLLALHRSYLTPGDSSSGWTAGAAAYYVGYLQPRTFLLKYNENGTITDAVDCALDPLSETKCTLKSFTVEKGIYQTSNFRVQPTESIVRFPNITNLCPFGEVFNATRFASVYAWNRKRISNCVADYSVLYNSASFSTFKCYGVSPTKLNDLCFTNVYADSFVIRGDEVRQIAPGQTGKIADYNYKLPDDFTGCVIAWNSNNLDSKVGGNYNYLYRLFRKSNLKPFCRDISTEIYQAGSTPCNGVEGFNCYFPLQSYGFQPTNGVGYQPYRVVVLSFELLHAPATVCGPKKSTNLVKNKCVNFNFNGLTGTGVLTESNKKFLPFQQFGRDIADTTDAVRDPQTLEILDITPCSFGGVSVITPGTNTSNQVAVLYQDVNCTEVPVAIHADQLTPTWRVYSTGSNVFQTRAGCLIGAEHVNNSYECDIPIGAGICASYQTQTNSPGSASSVASQSIIAYTMSLGAENSVAYSNNSIAIPTNFTISVTTEILPVSMTKTSVDCTMYICGDSTECSNLLLQYGSFCTQLNRALTGIAVEQDKNTQEVFAQVKQIYKTPPIKDFGGFNFSQILPDPSKPSKRSFIEDLLFNKVTLADAGFIKQYGDCLGDIAARDLICAQKFNGLTVLPPLLTDEMIAQYTSALLAGTITSGWTFGAGAALQIPFAMQMAYRFNGIGVTQNVLYENQKLIANQFNSAIGKIQDSLSSTASALGKLQDVVNQNAQALNTLVKQLSSNFGAISSVLNDILSRLDPPEAEVQIDRLITGRLQSLQTYVTQQLIRAAEIRASANLAATKMSECVLGQSKRVDFCGKGYHLMSFPQSAPHGVVFLHVTYVPAQEKNFTTAPAICHDGKAHFPREGVFVSNGTHWFVTQRNFYEPQIITTDNTFVSGNCDVVIGIVNNTVYDPLQPELDSFKEELDKYFKNHTSPDVDLGDISGINASVVNIQKEIDRLNEVAKNLNESLIDLQELGKYEQGYIPEAPRDGQAYVRKDGEWVLLSTFLG

SEQ ID NO: 119 - DNA, 3774 bp, Artificial Sequence
  WuS_2P_pVax
gccaccatggactggacctggatactctttctcgtagcagcagccacacgagtgcattcaatgtttgtgtttcttgtcctgttgccattggtgagctcccaatgtgtcaatctgaccacccggacacaattgccccctgcatatacaaattcattcacgagaggagtatactatcccgacaaagttttccggtcctcagtccttcattccactcaagatcttttccttccattcttttctaacgtaacctggttccatgcaattcatgtcagtgggaccaacggcacgaaacggtttgataatccagttcttccattcaatgacggagtatattttgcatcaactgagaaatctaatatcattagagggtggattttcggaacaactcttgactccaagacccaatccttgctcatcgttaacaatgctacaaatgtggttattaaggtctgtgagtttcaattctgtaacgacccctttctcggcgtatactaccataagaataataagtcttggatggagtctgaatttcgtgtctactcatcagcgaacaattgtacatttgaatatgtgtcccaaccattcctgatggatctcgaaggaaagcagggcaattttaagaaccttcgggagttcgtctttaagaatatcgatggatactttaaaatatatagtaaacacacaccaatcaatctggtccgagatctcccccagggttttagtgctctggagccgctggtggatttgcccatcggtatcaatattacgcgcttccaaacattgctcgccctgcatcggagttaccttacgcctggcgacagtagcagcggatggaccgctggagccgccgcctactatgtcgggtaccttcaaccacgcacttttctcctgaaatacaacgaaaatgggacaattacagacgctgttgattgcgcactcgatcccctgtcagaaacaaaatgtacacttaaatcttttacggtcgagaaagggatttaccagacatctaacttccgagtacaaccaaccgaatctatagtgcggttccccaacattacgaacctgtgcccgttcggcgaagtgttcaacgcaacacgatttgcttctgtttacgcttggaaccggaaacgcatctccaattgcgtcgccgattacagcgttctttataattctgcatctttctccaccttcaaatgctatggtgtctctcccacaaaactcaatgacctctgttttaccaatgtgtatgcggactccttcgtcatacgcggcgacgaggtgagacaaatcgcaccagggcagactggcaagatcgctgattataattacaaactgcctgatgattttaccggatgcgttattgcttggaattctaataacctcgattccaaagttggcgggaactacaattacctctaccgattgtttcgcaaatctaaccttaagccgtttgagagagatatcagcacagagatttatcaagctggctctaccccttgcaatggagtagaaggctttaactgctattttcctcttcagtcttatggatttcaacctaccaacggggtagggtaccaaccctatagagtcgtcgtgctctcatttgaactccttcacgcccccgctaccgtgtgtgggcctaagaaatccactaatctcgttaagaataagtgtgtgaattttaatttcaatggcctgacagggaccggggttctgactgaatctaacaagaaatttctgccgttccaacaattcgggcgcgatattgcagacacgaccgacgcggtgcgcgatcctcaaacactcgaaatccttgatatcactccttgttctttcggcggtgtaagcgtcattactcctggcaccaatacctctaaccaagtggcagtactctatcaagatgtgaactgcactgaggtcccggttgcaatacatgcggatcaactcaccccaacatggcgagtgtattccacagggagcaatgtgtttcaaacgagggccggctgtctcattggggccgaacacgttaataatagttatgagtgcgatattcccattggagcgggcatttgtgccagctatcagacccaaactaactcccccgggtccgcctcatcagtcgctagccaatctattattgcgtacacaatgtccctgggagctgaaaacagcgtggcctactcaaataacagcattgcaatacccacaaattttacgatttcagtaaccactgaaatcctgcccgtctccatgaccaaaacctctgtcgactgcactatgtacatatgcggcgactccaccgagtgttccaatctccttctccaatatggaagtttctgcacgcagttgaacagggcacttacagggattgcagtcgagcaagacaagaacacccaagaagtattcgcacaagtaaaacagatctacaagacacccccaatcaaagattttggtggcttcaacttctcccaaatacttccagatccgtcaaagccatccaaacgctcattcatcgaagaccttctgttcaataaggtcacattggcggatgctggatttatcaagcaatatggggattgtttgggagatattgcagcgcgggacctgatatgcgcgcaaaagttcaatgggttgacggtgctgccccctctcctcactgacgagatgatagctcagtatacgagcgctctcctcgcgggcactatcacctcaggttggaccttcggggctggcgcggcacttcaaataccatttgctatgcaaatggcctatcgttttaatggcatcggggtgacccaaaacgtgctctatgaaaaccagaaactgatagctaatcaattcaatagtgccatcggcaaaatccaggattcattgtccagcaccgcctcagctctcgggaaattgcaagacgtcgtcaaccaaaatgctcaagcgctcaacaccctcgttaaacaactctcaagtaatttcggcgcgattagtagcgtgctgaacgatatcttgagtcgtcttgatccacctgaagcagaagtccaaatcgacaggcttattaccggacgtctgcaaagcctgcaaacctacgttacacaacaacttataagggcagccgaaataagggcttctgcaaatctggctgccacgaagatgagcgagtgtgtcctcggacaaagcaaaagagttgacttttgcggcaaagggtaccaccttatgagtttccctcagtctgcgccccatggagtagtgtttctccacgtgacttatgtaccggcacaagaaaagaactttaccacagccccagcaatatgtcacgatggaaaagcacactttccacgggaaggggttttcgtgtccaacgggacccattggtttgttactcaacgcaacttttatgaaccccaaatcataaccactgataatacatttgtctctgggaactgtgatgtcgtgatcggaatagtcaacaacacagtgtatgatccgttgcaaccagagctggattccttcaaagaagaactcgacaagtattttaagaatcacacatcaccggacgtggatcttggagacatatcaggcataaacgctagtgtggtgaatatccaaaaggagatcgacaggcttaacgaagttgcaaagaacctcaatgaatctcttatcgatttgcaagaattgggcaaatacgagcaaggctacattcctgaagcaccacgggacgggcaagcttacgtgcggaaagatggcgaatgggtgctcttgagtacctttctgggttgataa

SEQ ID NO: 120 - RNA, 3774 nt, Artificial Sequence
  WuS_2P_pVax
gccaccauggacuggaccuggauacucuuucucguagcagcagccacacgagugcauucaauguuuguguuucuuguccuguugccauuggugagcucccaaugugucaaucugaccacccggacacaauugcccccugcauauacaaauucauucacgagaggaguauacuaucccgacaaaguuuuccgguccucaguccuucauuccacucaagaucuuuuccuuccauucuuuucuaacguaaccugguuccaugcaauucaugucagugggaccaacggcacgaaacgguuugauaauccaguucuuccauucaaugacggaguauauuuugcaucaacugagaaaucuaauaucauuagaggguggauuuucggaacaacucuugacuccaagacccaauccuugcucaucguuaacaaugcuacaaaugugguuauuaaggucugugaguuucaauucuguaacgaccccuuucucggcguauacuaccauaagaauaauaagucuuggauggagucugaauuucgugucuacucaucagcgaacaauuguacauuugaauaugugucccaaccauuccugauggaucucgaaggaaagcagggcaauuuuaagaaccuucgggaguucgucuuuaagaauaucgauggauacuuuaaaauauauaguaaacacacaccaaucaaucugguccgagaucucccccaggguuuuagugcucuggagccgcugguggauuugcccaucgguaucaauauuacgcgcuuccaaacauugcucgcccugcaucggaguuaccuuacgccuggcgacaguagcagcggauggaccgcuggagccgccgccuacuaugucggguaccuucaaccacgcacuuuucuccugaaauacaacgaaaaugggacaauuacagacgcuguugauugcgcacucgauccccugucagaaacaaaauguacacuuaaaucuuuuacggucgagaaagggauuuaccagacaucuaacuuccgaguacaaccaaccgaaucuauagugcgguuccccaacauuacgaaccugugcccguucggcgaaguguucaacgcaacacgauuugcuucuguuuacgcuuggaaccggaaacgcaucuccaauugcgucgccgauuacagcguucuuuauaauucugcaucuuucuccaccuucaaaugcuauggugucucucccacaaaacucaaugaccucuguuuuaccaauguguaugcggacuccuucgucauacgcggcgacgaggugagacaaaucgcaccagggcagacuggcaagaucgcugauuauaauuacaaacugccugaugauuuuaccggaugcguuauugcuuggaauucuaauaaccucgauuccaaaguuggcgggaacuacaauuaccucuaccgauuguuucgcaaaucuaaccuuaagccguuugagagagauaucagcacagagauuuaucaagcuggcucuaccccuugcaauggaguagaaggcuuuaacugcuauuuuccucuucagucuuauggauuucaaccuaccaacgggguaggguaccaacccuauagagucgucgugcucucauuugaacuccuucacgcccccgcuaccgugugugggccuaagaaauccacuaaucucguuaagaauaagugugugaauuuuaauuucaauggccugacagggaccgggguucugacugaaucuaacaagaaauuucugccguuccaacaauucgggcgcgauauugcagacacgaccgacgcggugcgcgauccucaaacacucgaaauccuugauaucacuccuuguucuuucggcgguguaagcgucauuacuccuggcaccaauaccucuaaccaaguggcaguacucuaucaagaugugaacugcacugaggucccgguugcaauacaugcggaucaacucaccccaacauggcgaguguauuccacagggagcaauguguuucaaacgagggccggcugucucauuggggccgaacacguuaauaauaguuaugagugcgauauucccauuggagcgggcauuugugccagcuaucagacccaaacuaacucccccggguccgccucaucagucgcuagccaaucuauuauugcguacacaaugucccugggagcugaaaacagcguggccuacucaaauaacagcauugcaauacccacaaauuuuacgauuucaguaaccacugaaauccugcccgucuccaugaccaaaaccucugucgacugcacuauguacauaugcggcgacuccaccgaguguuccaaucuccuucuccaauauggaaguuucugcacgcaguugaacagggcacuuacagggauugcagucgagcaagacaagaacacccaagaaguauucgcacaaguaaaacagaucuacaagacacccccaaucaaagauuuugguggcuucaacuucucccaaauacuuccagauccgucaaagccauccaaacgcucauucaucgaagaccuucuguucaauaaggucacauuggcggaugcuggauuuaucaagcaauauggggauuguuugggagauauugcagcgcgggaccugauaugcgcgcaaaaguucaauggguugacggugcugcccccucuccucacugacgagaugauagcucaguauacgagcgcucuccucgcgggcacuaucaccucagguuggaccuucggggcuggcgcggcacuucaaauaccauuugcuaugcaaauggccuaucguuuuaauggcaucggggugacccaaaacgugcucuaugaaaaccagaaacugauagcuaaucaauucaauagugccaucggcaaaauccaggauucauuguccagcaccgccucagcucucgggaaauugcaagacgucgucaaccaaaaugcucaagcgcucaacacccucguuaaacaacucucaaguaauuucggcgcgauuaguagcgugcugaacgauaucuugagucgucuugauccaccugaagcagaaguccaaaucgacaggcuuauuaccggacgucugcaaagccugcaaaccuacguuacacaacaacuuauaagggcagccgaaauaagggcuucugcaaaucuggcugccacgaagaugagcgaguguguccucggacaaagcaaaagaguugacuuuugcggcaaaggguaccaccuuaugaguuucccucagucugcgccccauggaguaguguuucuccacgugacuuauguaccggcacaagaaaagaacuuuaccacagccccagcaauaugucacgauggaaaagcacacuuuccacgggaagggguuuucguguccaacgggacccauugguuuguuacucaacgcaacuuuuaugaaccccaaaucauaaccacugauaauacauuugucucugggaacugugaugucgugaucggaauagucaacaacacaguguaugauccguugcaaccagagcuggauuccuucaaagaagaacucgacaaguauuuuaagaaucacacaucaccggacguggaucuuggagacauaucaggcauaaacgcuaguguggugaauauccaaaaggagaucgacaggcuuaacgaaguugcaaagaaccucaaugaaucucuuaucgauuugcaagaauugggcaaauacgagcaaggcuacauuccugaagcaccacgggacgggcaagcuuacgugcggaaagauggcgaaugggugcucuugaguaccuuucuggguugauaa

SEQ ID NO: 121 - protein, 1254 aa, Artificial Sequence
  WuS_2P_pVax
MDWTWILFLVAAATRVHSMFVFLVLLPLVSSQCVNLTTRTQLPPAYTNSFTRGVYYPDKVFRSSVLHSTQDLFLPFFSNVTWFHAIHVSGTNGTKRFDNPVLPFNDGVYFASTEKSNIIRGWIFGTTLDSKTQSLLIVNNATNVVIKVCEFQFCNDPFLGVYYHKNNKSWMESEFRVYSSANNCTFEYVSQPFLMDLEGKQGNFKNLREFVFKNIDGYFKIYSKHTPINLVRDLPQGFSALEPLVDLPIGINITRFQTLLALHRSYLTPGDSSSGWTAGAAAYYVGYLQPRTFLLKYNENGTITDAVDCALDPLSETKCTLKSFTVEKGIYQTSNFRVQPTESIVRFPNITNLCPFGEVFNATRFASVYAWNRKRISNCVADYSVLYNSASFSTFKCYGVSPTKLNDLCFTNVYADSFVIRGDEVRQIAPGQTGKIADYNYKLPDDFTGCVIAWNSNNLDSKVGGNYNYLYRLFRKSNLKPFERDISTEIYQAGSTPCNGVEGFNCYFPLQSYGFQPTNGVGYQPYRVVVLSFELLHAPATVCGPKKSTNLVKNKCVNFNFNGLTGTGVLTESNKKFLPFQQFGRDIADTTDAVRDPQTLEILDITPCSFGGVSVITPGTNTSNQVAVLYQDVNCTEVPVAIHADQLTPTWRVYSTGSNVFQTRAGCLIGAEHVNNSYECDIPIGAGICASYQTQTNSPGSASSVASQSIIAYTMSLGAENSVAYSNNSIAIPTNFTISVTTEILPVSMTKTSVDCTMYICGDSTECSNLLLQYGSFCTQLNRALTGIAVEQDKNTQEVFAQVKQIYKTPPIKDFGGFNFSQILPDPSKPSKRSFIEDLLFNKVTLADAGFIKQYGDCLGDIAARDLICAQKFNGLTVLPPLLTDEMIAQYTSALLAGTITSGWTFGAGAALQIPFAMQMAYRFNGIGVTQNVLYENQKLIANQFNSAIGKIQDSLSSTASALGKLQDVVNQNAQALNTLVKQLSSNFGAISSVLNDILSRLDPPEAEVQIDRLITGRLQSLQTYVTQQLIRAAEIRASANLAATKMSECVLGQSKRVDFCGKGYHLMSFPQSAPHGVVFLHVTYVPAQEKNFTTAPAICHDGKAHFPREGVFVSNGTHWFVTQRNFYEPQIITTDNTFVSGNCDVVIGIVNNTVYDPLQPELDSFKEELDKYFKNHTSPDVDLGDISGINASVVNIQKEIDRLNEVAKNLNESLIDLQELGKYEQGYIPEAPRDGQAYVRKDGEWVLLSTFLG

SEQ ID NO: 122 - DNA, 3840 bp, Artificial Sequence
  WuDivS_3F_D2P_Gly_pVax
ggatccgccaccatggattggacatggatattgttcttggttgcagcagctacccgggtacattccatgttcgtcttcctcgtactgctcccacttgtcagtagtcaatgtgtgaacttgactacccggacgcagttgcccccggcctacactaatagcataacgcgtggagtctattaccccgacaaggtgttcaggtcatccgtcctgtatagcactcaagatctcttcttgcccttctttagtaacgtcacttggttccatgcaatccacgtaagtggcactaatggcaccaagcgattcgacaatcccgtactcccttttaacgatggggtgtatttcgcgagcacagagaagtccaacatcatccgtggttggatcttcggcaccacactggattctaaaacccaaagcctgcttatagtaaataatgcaacaaacgtggtcattaaagtttgcgaatttcagttttgtaacgaccccttccttggcgtatattaccacaagaacaataaatcctggatggagagcgaatttagggtttacagttcagccaataattgtacattcgaatacgtaagccaacccttcttgatggacctggaaggaaagcaaggaaatttcaagaatctccgtgaattcgtgttcaagaacatagacggctattttaaaatatattcaaaacacacaccgattaacctggtacgagatcttccgcaaggattctctgcactggaaccgctggtcgatcttcctatcggcattaatatcactcggtttcaaacattgcttgctttgcatcggcgatatcttacacccggggatagctcaagtggatggactgccggggctgctgcctattacgtaggctatctccaaccacggacattcctgctgaaatataacgagaatgggacaatcacagatgctgttgactgcgctttggaccctttgagcgaaacaaagtgcacactcaaatccttcaccgtggaaaagggaatctaccaaacgtctaattttcgcgtccaaccaaccgagagcatcgtcagattcccaaacattactaatctttgcccctttggcgaagtcttcaatgctacgcgatttgcgtccgtctacgcgtggaatcggaagcgcattagcaattgcgtcgcagactattcctttctctataactctgcatccttttctacctttaaatgttatggagtcaacgggacaaagctcaatgacctttgctttacaaatgtctatgcagactcttttgtcatccgtggtgatgaggtacgacagatcgcgccaggacaaaccgggaagatcgccgattacaactacaaactgcccgacgatttcaccgggtgcgttattgcttggaactccaataatcttgatagtaaagttggcggcaactacaactacctgtatcgacttttccgtaaaagtaatctcaagccatttgaaagagacatcaacacaacaatttatcaggctggatctaccccatgcaacggcgttgaaggatttaactgctacttccctctccaaagttacggtttccaaccaacaaacggcgttggctatcaaccttatagagtcgttgtcctctcttttgagcttaaccatgccccagcgacagtgtgtgggccgaagaaaagcactaatttggttaagaataaatgtgttaactttaattttaatggattgacggggacaggggttctgacagagtctaacaagaaatttctgccgttccaacagtttgggcgagatattgcagataccacggacgccgttcgagacccccaaacacttgaaattctcgatataactccctgcagctttggcggtgtatccgttatcacgcccgggacaaataccagtaaccaagtcgcagtcctgtatcaaggcgtaaattgtacggaagtgcccgttgctatacacgctgaccaactgactcccacatggagagtctatagtactggttctaatgtgttccaaacacgagccggttgcctgatcggagccgaacatgttaacaactcatacgaatgtgacataccgattggcgccggcatttgcgccagctatcaaacgcagaccaactcaccaagaaggcgtcgcagtgtagcaagtcaatctattatagcgtataccatgtctttgggagcagaaaactccgttgcttactctaataattctattgctatcccaaccaattttacaatctcagttactaccgaaatactgccggtaagcatgactaagacatccgtggattgcactatgtacatctgtggggactcaacagagtgtagtaatttgctgcttcaatatggctccttctgcactcaactgaatcgtgctctcacgggaattgctgttgagcaagataagaatacccaggaagtgtttgcccaagtcaaacaaatttataagacaccaccaattaaagattttggtggatttaatttcagccaaatacttccagatccctcacgcagacgacggtctttcatcgaggaccttctgttcaacaaagttactctggctgatgcaggcttcattaagcagtacggtgattgtcttggagacatcgctgcgcgcgacctcatatgcgcccagaaatttaatgggctgaccgtacttccccctttgctgactgatgagatgattgcacaatacacttccgcactccttgcgggtactatcacatccgggtggacttttggagctggcgccgctcttcaaattcccttcgccatgcaaatggcgtacaggtttaatggcatcggtgtgacacagaatgtgctctatgagaaccagaaacttatcgcaaaccagttcaattcagccatcgggaaaatccaagatagtctcagtagtactgcctcagctctcggcaagctccaggatgtagtgaatcagaatgcacaagccttgaacactctcgttaaacaactttcttccaactttggtgccatcagcagtgggcctaacgatatattgagccgcttgcccaaagtggaagcggaagtccaaatagatagacttattaccggccggctgcaatctctgcaaacctatgtgactcaacaattgatccgagctgccgaaatccgtgccagtgcaaatctcgccgcgaccaagatgagcgaatgtgtcttgggacagagcaaaagagtcgatttctgcggaaaaggctaccacctgatgtctttccctcaatctgccccgcacggagtggtctttctccatgtgacttatgtgccagcccaagaaaagaactttacaaccgcaccggcaatttgccatgacggaaaggcgcatttcccccgtgagggagtctttgtgagcaacgggacccattggttcgtgacacaacgcaatttctatgagcctcagatcattaccacggacaatactttcgtgtctggcaactgtgacgtgctgataggcatcgtgaataataccgtctacgatcccttgcaacttgaactggactcattcaaagaagagctggataagtattttaagaaccatacaagccctgatgtcgatcttggggatatatcaggcataaacgcatctgttgtgaatatccaaaaggaaattgatagattgaacgaagttgccaagaacctcaatgaaagtcttatcgacctgcaagaactgggaaaatatgagcaatatataaaatggccatggagcgggcgccggagacggagaaggggtagcggcggtagtggtagcgggtacatcccagaggcacccagagatggacaagcttacgtaaggaaggacggggaatgggtgctgctcagtacatttcttggatgataa

SEQ ID NO: 123 - RNA, 3840 nt, Artificial Sequence
  WuDivS_3F_D2P_Gly_pVax
ggauccgccaccauggauuggacauggauauuguucuugguugcagcagcuacccggguacauuccauguucgucuuccucguacugcucccacuugucaguagucaaugugugaacuugacuacccggacgcaguugcccccggccuacacuaauagcauaacgcguggagucuauuaccccgacaagguguucaggucauccguccuguauagcacucaagaucucuucuugcccuucuuuaguaacgucacuugguuccaugcaauccacguaaguggcacuaauggcaccaagcgauucgacaaucccguacucccuuuuaacgaugggguguauuucgcgagcacagagaaguccaacaucauccgugguuggaucuucggcaccacacuggauucuaaaacccaaagccugcuuauaguaaauaaugcaacaaacguggucauuaaaguuugcgaauuucaguuuuguaacgaccccuuccuuggcguauauuaccacaagaacaauaaauccuggauggagagcgaauuuaggguuuacaguucagccaauaauuguacauucgaauacguaagccaacccuucuugauggaccuggaaggaaagcaaggaaauuucaagaaucuccgugaauucguguucaagaacauagacggcuauuuuaaaauauauucaaaacacacaccgauuaaccugguacgagaucuuccgcaaggauucucugcacuggaaccgcuggucgaucuuccuaucggcauuaauaucacucgguuucaaacauugcuugcuuugcaucggcgauaucuuacacccggggauagcucaaguggauggacugccggggcugcugccuauuacguaggcuaucuccaaccacggacauuccugcugaaauauaacgagaaugggacaaucacagaugcuguugacugcgcuuuggacccuuugagcgaaacaaagugcacacucaaauccuucaccguggaaaagggaaucuaccaaacgucuaauuuucgcguccaaccaaccgagagcaucgucagauucccaaacauuacuaaucuuugccccuuuggcgaagucuucaaugcuacgcgauuugcguccgucuacgcguggaaucggaagcgcauuagcaauugcgucgcagacuauuccuuucucuauaacucugcauccuuuucuaccuuuaaauguuauggagucaacgggacaaagcucaaugaccuuugcuuuacaaaugucuaugcagacucuuuugucauccguggugaugagguacgacagaucgcgccaggacaaaccgggaagaucgccgauuacaacuacaaacugcccgacgauuucaccgggugcguuauugcuuggaacuccaauaaucuugauaguaaaguuggcggcaacuacaacuaccuguaucgacuuuuccguaaaaguaaucucaagccauuugaaagagacaucaacacaacaauuuaucaggcuggaucuaccccaugcaacggcguugaaggauuuaacugcuacuucccucuccaaaguuacgguuuccaaccaacaaacggcguuggcuaucaaccuuauagagucguuguccucucuuuugagcuuaaccaugccccagcgacagugugugggccgaagaaaagcacuaauuugguuaagaauaaauguguuaacuuuaauuuuaauggauugacggggacagggguucugacagagucuaacaagaaauuucugccguuccaacaguuugggcgagauauugcagauaccacggacgccguucgagacccccaaacacuugaaauucucgauauaacucccugcagcuuuggcgguguauccguuaucacgcccgggacaaauaccaguaaccaagucgcaguccuguaucaaggcguaaauuguacggaagugcccguugcuauacacgcugaccaacugacucccacauggagagucuauaguacugguucuaauguguuccaaacacgagccgguugccugaucggagccgaacauguuaacaacucauacgaaugugacauaccgauuggcgccggcauuugcgccagcuaucaaacgcagaccaacucaccaagaaggcgucgcaguguagcaagucaaucuauuauagcguauaccaugucuuugggagcagaaaacuccguugcuuacucuaauaauucuauugcuaucccaaccaauuuuacaaucucaguuacuaccgaaauacugccgguaagcaugacuaagacauccguggauugcacuauguacaucuguggggacucaacagaguguaguaauuugcugcuucaauauggcuccuucugcacucaacugaaucgugcucucacgggaauugcuguugagcaagauaagaauacccaggaaguguuugcccaagucaaacaaauuuauaagacaccaccaauuaaagauuuugguggauuuaauuucagccaaauacuuccagaucccucacgcagacgacggucuuucaucgaggaccuucuguucaacaaaguuacucuggcugaugcaggcuucauuaagcaguacggugauugucuuggagacaucgcugcgcgcgaccucauaugcgcccagaaauuuaaugggcugaccguacuucccccuuugcugacugaugagaugauugcacaauacacuuccgcacuccuugcggguacuaucacauccggguggacuuuuggagcuggcgccgcucuucaaauucccuucgccaugcaaauggcguacagguuuaauggcaucggugugacacagaaugugcucuaugagaaccagaaacuuaucgcaaaccaguucaauucagccaucgggaaaauccaagauagucucaguaguacugccucagcucucggcaagcuccaggauguagugaaucagaaugcacaagccuugaacacucucguuaaacaacuuucuuccaacuuuggugccaucagcagugggccuaacgauauauugagccgcuugcccaaaguggaagcggaaguccaaauagauagacuuauuaccggccggcugcaaucucugcaaaccuaugugacucaacaauugauccgagcugccgaaauccgugccagugcaaaucucgccgcgaccaagaugagcgaaugugucuugggacagagcaaaagagucgauuucugcggaaaaggcuaccaccugaugucuuucccucaaucugccccgcacggaguggucuuucuccaugugacuuaugugccagcccaagaaaagaacuuuacaaccgcaccggcaauuugccaugacggaaaggcgcauuucccccgugagggagucuuugugagcaacgggacccauugguucgugacacaacgcaauuucuaugagccucagaucauuaccacggacaauacuuucgugucuggcaacugugacgugcugauaggcaucgugaauaauaccgucuacgaucccuugcaacuugaacuggacucauucaaagaagagcuggauaaguauuuuaagaaccauacaagcccugaugucgaucuuggggauauaucaggcauaaacgcaucuguugugaauauccaaaaggaaauugauagauugaacgaaguugccaagaaccucaaugaaagucuuaucgaccugcaagaacugggaaaauaugagcaauauauaaaauggccauggagcgggcgccggagacggagaagggguagcggcgguagugguagcggguacaucccagaggcacccagagauggacaagcuuacguaaggaaggacggggaaugggugcugcucaguacauuucuuggaugauaa

SEQ ID NO: 124 - protein, 1274 aa, Artificial Sequence
  WuDivS_3F_D2P_Gly_pVax
MDWTWILFLVAAATRVHSMFVFLVLLPLVSSQCVNLTTRTQLPPAYTNSFTRGVYYPDKVFRSSVLHSTQDLFLPFFSNVTWFHAIHVSGTNGTKRFDNPVLPFNDGVYFASTEKSNIIRGWIFGTTLDSKTQSLLIVNNATNVVIKVCEFQFCNDPFLGVYYHKNNKSWMESEFRVYSSANNCTFEYVSQPFLMDLEGKQGNFKNLREFVFKNIDGYFKIYSKHTPINLVRDLPQGFSALEPLVDLPIGINITRFQTLLALHRSYLTPGDSSSGWTAGAAAYYVGYLQPRTFLLKYNENGTITDAVDCALDPLSETKCTLKSFTVEKGIYQTSNFRVQPTESIVRFPNITNLCPFGEVFNATRFASVYAWNRKRISNCVADYSVLYNSASFSTFKCYGVNGTKLNDLCFTNVYADSFVIRGDEVRQIAPGQTGKIADYNYKLPDDFTGCVIAWNSNNLDSKVGGNYNYLYRLFRKSNLKPFERDINTTIYQAGSTPCNGVEGFNCYFPLQSYGFQPTNGVGYQPYRVVVLSFELNHAPATVCGPKKSTNLVKNKCVNFNFNGLTGTGVLTESNKKFLPFQQFGRDIADTTDAVRDPQTLEILDITPCSFGGVSVITPGTNTSNQVAVLYQDVNCTEVPVAIHADQLTPTWRVYSTGSNVFQTRAGCLIGAEHVNNSYECDIPIGAGICASYQTQTNSPRRRRSVASQSIIAYTMSLGAENSVAYSNNSIAIPTNFTISVTTEILPVSMTKTSVDCTMYICGDSTECSNLLLQYGSFCTQLNRALTGIAVEQDKNTQEVFAQVKQIYKTPPIKDFGGFNFSQILPDPSRRRRSFIEDLLFNKVTLADAGFIKQYGDCLGDIAARDLICAQKFNGLTVLPPLLTDEMIAQYTSALLAGTITSGWTFGAGAALQIPFAMQMAYRFNGIGVTQNVLYENQKLIANQFNSAIGKIQDSLSSTASALGKLQDVVNQNAQALNTLVKQLSSNFGAISSGPNDILSRLPKVEAEVQIDRLITGRLQSLQTYVTQQLIRAAEIRASANLAATKMSECVLGQSKRVDFCGKGYHLMSFPQSAPHGVVFLHVTYVPAQEKNFTTAPAICHDGKAHFPREGVFVSNGTHWFVTQRNFYEPQIITTDNTFVSGNCDVVIGIVNNTVYDPLQPELDSFKEELDKYFKNHTSPDVDLGDISGINASVVNIQKEIDRLNEVAKNLNESLIDLQELGKYEQYIKWPWSGRRRRRRGSGGSGSGYIPEAPRDGQAYVRKDGEWVLLSTFLG

SEQ ID NO: 125 - DNA, 3711 bp, Artificial Sequence
  WuS_3F_2P_NoTri_pVax
ggatccgccaccatggactggacgtggattttgtttcttgtcgctgcagctacccgggttcactccatgtttgttttcctggtgctccttccccttgtaagctcacaatgcgtcaatttgaccacgcgtacacaactgcccccagcatatactaattctttcacacgcggggtctactatcccgataaagtctttagaagtagcgtacttcatagtacccaagatttgtttctgcccttcttcagcaatgtcacgtggtttcatgcgatccatgtatccggcacgaacgggacaaaacgatttgataaccccgtgctccccttcaacgacggggtttatttcgccagcaccgagaaatcaaatattatcaggggctggattttcgggacaacacttgattccaagacacaatctcttcttatcgtgaataatgcaactaatgtggtgatcaaggtttgcgagttccaattttgtaatgacccttttcttggcgtgtactatcataagaataacaagagttggatggaatcagagttccgggtctacagcagtgctaacaattgtacgtttgaatacgtttctcagccttttctgatggaccttgaaggtaagcaaggcaatttcaagaacttgcgggaatttgtcttcaagaacatagatggctattttaagatatatagcaaacacactcccataaatctcgtcagagatcttccacagggctttagcgccctggaaccattggttgatttgccaattggaataaacataactcgattccaaaccttgctcgcactccatcggagctacctgacgcctggagattcctcttccggctggactgccggagcagcagcttattatgtaggctacttgcaaccccgcacgttcctgctcaaatataatgaaaatggcactataaccgatgcggtagactgcgctcttgatcccctgagtgaaactaaatgtacgttgaaaagctttactgtagagaaaggcatctatcagactagtaactttagggtgcaacccacggagtccattgtacggttcccaaacattaccaacctctgtccattcggagaagtgtttaatgccacaagattcgcttcagtgtatgcctggaaccggaaacgcatctcaaattgcgttgccgattattcagtactttacaactcagccagtttctctacttttaagtgctatggcgtttccccgacgaagctcaatgatctgtgctttactaacgtttacgcagactctttcgtcatcagaggcgatgaagtcaggcaaatagctcctggtcaaaccggcaagatcgccgactacaactataaactgcccgatgatttcactgggtgtgtgatcgcgtggaattccaataatttggactctaaggtaggtggcaactataactacctctatcgactcttccgaaaatccaaccttaagccgtttgaacgcgatattagtaccgaaatataccaagccgggtctacaccctgtaacggcgttgaaggtttcaattgttactttccactgcagagttatggctttcaacccaccaacggggttggctatcagccctatagggttgtggtcctcagttttgagcttctgcatgcaccagcaaccgtgtgcggacctaagaagtcaacaaatctcgtgaagaacaagtgtgttaatttcaatttcaatggccttacagggaccggagtgcttacagaaagcaataagaagttcttgccctttcaacagttcggcagggacatagcggacacgacagatgcagttcgagacccgcaaactctcgaaattctggatatcacaccttgcagttttggtggcgtgtctgttatcacaccaggcaccaacacttccaaccaggtggcagttttgtaccaggatgttaattgtacagaggtcccagtggcaatacacgctgaccaactgactccaacttggagagtctactctacaggctcaaacgtcttccaaacacgggcggggtgtctgatcggagcagaacacgttaataacagttacgagtgtgatatcccgataggagctggtatttgcgcttcataccagacgcaaacgaactcaccacgaagacgccggtcagttgcatcacaatccattattgcatacaccatgtcactcggagcggagaattctgtagcatacagtaacaatagtatcgcaatacctacgaactttaccatttccgtcacaactgaaatcttgcccgtctcaatgacaaagacaagcgtagattgtacaatgtatatttgcggagattcaacagagtgctccaacctgctgctccagtacggtagtttctgtacccagctcaatagggccctcaccggaattgcagttgaacaagacaagaacacccaagaagtgtttgcacaagtcaaacaaatctataaaacacccccaatcaaagatttcggtggcttcaacttttcacaaattctccctgatcctagccgccgccgcagatcattcatcgaagacttgctcttcaataaggttaccctggcagacgccggttttattaaacaatacggagattgcctcggtgacatcgccgctagagaccttatctgtgcccaaaagttcaacggactcaccgtgctgcccccattgctgaccgatgaaatgattgctcaatatacatctgcgctcctcgcagggaccattacttcagggtggacttttggggctggcgccgcattgcagattcccttcgccatgcagatggcatataggtttaacggcattggagttacccaaaatgtactctacgagaaccaaaagctgattgcaaatcagttcaacagtgcaataggcaaaatacaagactctctgtcttcaaccgccagcgctcttggaaagctccaagatgttgttaatcaaaatgcccaagcgttgaataccctcgtgaagcaactctccagcaattttggtgccatctctagcgtgctgaacgacattctgtcacggctcgatcccccggaagccgaggtacaaattgaccgattgataaccgggcgactccaaagccttcagacctacgttacacaacagctcattcgcgctgcagaaattagagcctctgcaaatcttgcagctacaaagatgtcagagtgcgttctcggtcaaagcaaaagagtggatttctgcggaaaggggtaccacctcatgagtttcccacagagtgcccctcatggcgtagtctttcttcatgttacttatgtaccagcccaagaaaagaatttcactacagcacccgcgatttgtcatgatggcaaagcgcacttccctcgggaaggcgtgttcgtgtctaatggaacacattggttcgtgacgcaacggaatttctacgagccccaaattatcactactgataacaccttcgtctccggaaactgcgatgttgttattggcattgtcaacaataccgtttacgacccgctccaacctgagctggattcatttaaagaggaattggacaaatattttaagaatcatacctctccagacgtggatttgggtgacattagcggaataaatgcatctgtggtcaatatccaaaaggaaattgataggctgaacgaggtcgccaagaatttgaacgaatctttgattgatcttcaagaacttggcaagtatgaacaatacataaaatggccctggtgatag

SEQ ID NO: 126 - RNA, 3711 nt, Artificial Sequence
  WuS_3F_2P_NoTri_pVax
ggauccgccaccauggacuggacguggauuuuguuucuugucgcugcagcuacccggguucacuccauguuuguuuuccuggugcuccuuccccuuguaagcucacaaugcgucaauuugaccacgcguacacaacugcccccagcauauacuaauucuuucacacgcggggucuacuaucccgauaaagucuuuagaaguagcguacuucauaguacccaagauuuguuucugcccuucuucagcaaugucacgugguuucaugcgauccauguauccggcacgaacgggacaaaacgauuugauaaccccgugcuccccuucaacgacgggguuuauuucgccagcaccgagaaaucaaauauuaucaggggcuggauuuucgggacaacacuugauuccaagacacaaucucuucuuaucgugaauaaugcaacuaauguggugaucaagguuugcgaguuccaauuuuguaaugacccuuuucuuggcguguacuaucauaagaauaacaagaguuggauggaaucagaguuccgggucuacagcagugcuaacaauuguacguuugaauacguuucucagccuuuucugauggaccuugaagguaagcaaggcaauuucaagaacuugcgggaauuugucuucaagaacauagauggcuauuuuaagauauauagcaaacacacucccauaaaucucgucagagaucuuccacagggcuuuagcgcccuggaaccauugguugauuugccaauuggaauaaacauaacucgauuccaaaccuugcucgcacuccaucggagcuaccugacgccuggagauuccucuuccggcuggacugccggagcagcagcuuauuauguaggcuacuugcaaccccgcacguuccugcucaaauauaaugaaaauggcacuauaaccgaugcgguagacugcgcucuugauccccugagugaaacuaaauguacguugaaaagcuuuacuguagagaaaggcaucuaucagacuaguaacuuuagggugcaacccacggaguccauuguacgguucccaaacauuaccaaccucuguccauucggagaaguguuuaaugccacaagauucgcuucaguguaugccuggaaccggaaacgcaucucaaauugcguugccgauuauucaguacuuuacaacucagccaguuucucuacuuuuaagugcuauggcguuuccccgacgaagcucaaugaucugugcuuuacuaacguuuacgcagacucuuucgucaucagaggcgaugaagucaggcaaauagcuccuggucaaaccggcaagaucgccgacuacaacuauaaacugcccgaugauuucacugggugugugaucgcguggaauuccaauaauuuggacucuaagguagguggcaacuauaacuaccucuaucgacucuuccgaaaauccaaccuuaagccguuugaacgcgauauuaguaccgaaauauaccaagccgggucuacacccuguaacggcguugaagguuucaauuguuacuuuccacugcagaguuauggcuuucaacccaccaacgggguuggcuaucagcccuauaggguugugguccucaguuuugagcuucugcaugcaccagcaaccgugugcggaccuaagaagucaacaaaucucgugaagaacaaguguguuaauuucaauuucaauggccuuacagggaccggagugcuuacagaaagcaauaagaaguucuugcccuuucaacaguucggcagggacauagcggacacgacagaugcaguucgagacccgcaaacucucgaaauucuggauaucacaccuugcaguuuugguggcgugucuguuaucacaccaggcaccaacacuuccaaccagguggcaguuuuguaccaggauguuaauuguacagaggucccaguggcaauacacgcugaccaacugacuccaacuuggagagucuacucuacaggcucaaacgucuuccaaacacgggcggggugucugaucggagcagaacacguuaauaacaguuacgagugugauaucccgauaggagcugguauuugcgcuucauaccagacgcaaacgaacucaccacgaagacgccggucaguugcaucacaauccauuauugcauacaccaugucacucggagcggagaauucuguagcauacaguaacaauaguaucgcaauaccuacgaacuuuaccauuuccgucacaacugaaaucuugcccgucucaaugacaaagacaagcguagauuguacaauguauauuugcggagauucaacagagugcuccaaccugcugcuccaguacgguaguuucuguacccagcucaauagggcccucaccggaauugcaguugaacaagacaagaacacccaagaaguguuugcacaagucaaacaaaucuauaaaacacccccaaucaaagauuucgguggcuucaacuuuucacaaauucucccugauccuagccgccgccgcagaucauucaucgaagacuugcucuucaauaagguuacccuggcagacgccgguuuuauuaaacaauacggagauugccucggugacaucgccgcuagagaccuuaucugugcccaaaaguucaacggacucaccgugcugcccccauugcugaccgaugaaaugauugcucaauauacaucugcgcuccucgcagggaccauuacuucaggguggacuuuuggggcuggcgccgcauugcagauucccuucgccaugcagauggcauauagguuuaacggcauuggaguuacccaaaauguacucuacgagaaccaaaagcugauugcaaaucaguucaacagugcaauaggcaaaauacaagacucucugucuucaaccgccagcgcucuuggaaagcuccaagauguuguuaaucaaaaugcccaagcguugaauacccucgugaagcaacucuccagcaauuuuggugccaucucuagcgugcugaacgacauucugucacggcucgaucccccggaagccgagguacaaauugaccgauugauaaccgggcgacuccaaagccuucagaccuacguuacacaacagcucauucgcgcugcagaaauuagagccucugcaaaucuugcagcuacaaagaugucagagugcguucucggucaaagcaaaagaguggauuucugcggaaagggguaccaccucaugaguuucccacagagugccccucauggcguagucuuucuucauguuacuuauguaccagcccaagaaaagaauuucacuacagcacccgcgauuugucaugauggcaaagcgcacuucccucgggaaggcguguucgugucuaauggaacacauugguucgugacgcaacggaauuucuacgagccccaaauuaucacuacugauaacaccuucgucuccggaaacugcgauguuguuauuggcauugucaacaauaccguuuacgacccgcuccaaccugagcuggauucauuuaaagaggaauuggacaaauauuuuaagaaucauaccucuccagacguggauuugggugacauuagcggaauaaaugcaucuguggucaauauccaaaaggaaauugauaggcugaacgaggucgccaagaauuugaacgaaucuuugauugaucuucaagaacuuggcaaguaugaacaauacauaaaauggcccuggugauag

SEQ ID NO: 127 - protein, 1231 aa, Artificial Sequence
  WuS_3F_2P_NoTri_pVax
MDWTWILFLVAAATRVHSMFVFLVLLPLVSSQCVNLTTRTQLPPAYTNSFTRGVYYPDKVFRSSVLHSTQDLFLPFFSNVTWFHAIHVSGTNGTKRFDNPVLPFNDGVYFASTEKSNIIRGWIFGTTLDSKTQSLLIVNNATNVVIKVCEFQFCNDPFLGVYYHKNNKSWMESEFRVYSSANNCTFEYVSQPFLMDLEGKQGNFKNLREFVFKNIDGYFKIYSKHTPINLVRDLPQGFSALEPLVDLPIGINITRFQTLLALHRSYLTPGDSSSGWTAGAAAYYVGYLQPRTFLLKYNENGTITDAVDCALDPLSETKCTLKSFTVEKGIYQTSNFRVQPTESIVRFPNITNLCPFGEVFNATRFASVYAWNRKRISNCVADYSVLYNSASFSTFKCYGVSPTKLNDLCFTNVYADSFVIRGDEVRQIAPGQTGKIADYNYKLPDDFTGCVIAWNSNNLDSKVGGNYNYLYRLFRKSNLKPFERDISTEIYQAGSTPCNGVEGFNCYFPLQSYGFQPTNGVGYQPYRVVVLSFELLHAPATVCGPKKSTNLVKNKCVNFNFNGLTGTGVLTESNKKFLPFQQFGRDIADTTDAVRDPQTLEILDITPCSFGGVSVITPGTNTSNQVAVLYQDVNCTEVPVAIHADQLTPTWRVYSTGSNVFQTRAGCLIGAEHVNNSYECDIPIGAGICASYQTQTNSPRRRRSVASQSIIAYTMSLGAENSVAYSNNSIAIPTNFTISVTTEILPVSMTKTSVDCTMYICGDSTECSNLLLQYGSFCTQLNRALTGIAVEQDKNTQEVFAQVKQIYKTPPIKDFGGFNFSQILPDPSRRRRSFIEDLLFNKVTLADAGFIKQYGDCLGDIAARDLICAQKFNGLTVLPPLLTDEMIAQYTSALLAGTITSGWTFGAGAALQIPFAMQMAYRFNGIGVTQNVLYENQKLIANQFNSAIGKIQDSLSSTASALGKLQDVVNQNAQALNTLVKQLSSNFGAISSVLNDILSRLDPPEAEVQIDRLITGRLQSLQTYVTQQLIRAAEIRASANLAATKMSECVLGQSKRVDFCGKGYHLMSFPQSAPHGVVFLHVTYVPAQEKNFTTAPAICHDGKAHFPREGVFVSNGTHWFVTQRNFYEPQIITTDNTFVSGNCDVVIGIVNNTVYDPLQPELDSFKEELDKYFKNHTSPDVDLGDISGINASVVNIQKEIDRLNEVAKNLNESLIDLQELGKYEQYIKWPW

SEQ ID NO: 128 - DNA, 3840 bp, Artificial Sequence
  WuS_3F_D2P_Gly_pVax
ggatccgccaccatggattggacatggatattgttcttggttgcagcagctacccgggtacattccatgttcgtcttcctcgtactgctcccacttgtcagtagtcaatgtgtgaacttgactacccggacgcagttgcccccggcctacactaatagctttacgcgtggagtctattaccccgacaaggtgttcaggtcatccgtcctgcatagcactcaagatctcttcttgcccttctttagtaacgtcacttggttccatgcaatccacgtaagtggcactaatggcaccaagcgattcgacaatcccgtactcccttttaacgatggggtgtatttcgcgagcacagagaagtccaacatcatccgtggttggatcttcggcaccacactggattctaaaacccaaagcctgcttatagtaaataatgcaacaaacgtggtcattaaagtttgcgaatttcagttttgtaacgaccccttccttggcgtatattaccacaagaacaataaatcctggatggagagcgaatttagggtttacagttcagccaataattgtacattcgaatacgtaagccaacccttcttgatggacctggaaggaaagcaaggaaatttcaagaatctccgtgaattcgtgttcaagaacatagacggctattttaaaatatattcaaaacacacaccgattaacctggtacgagatcttccgcaaggattctctgcactggaaccgctggtcgatcttcctatcggcattaatatcactcggtttcaaacattgcttgctttgcatcggagttatcttacacccggggatagctcaagtggatggactgccggggctgctgcctattacgtaggctatctccaaccacggacattcctgctgaaatataacgagaatgggacaatcacagatgctgttgactgcgctttggaccctttgagcgaaacaaagtgcacactcaaatccttcaccgtggaaaagggaatctaccaaacgtctaattttcgcgtccaaccaaccgagagcatcgtcagattcccaaacattactaatctttgcccctttggcgaagtcttcaatgctacgcgatttgcgtccgtctacgcgtggaatcggaagcgcattagcaattgcgtcgcagactattccgtgctctataactctgcatccttttctacctttaaatgttatggagtcaacgggacaaagctcaatgacctttgctttacaaatgtctatgcagactcttttgtcatccgtggtgatgaggtacgacagatcgcgccaggacaaaccgggaagatcgccgattacaactacaaactgcccgacgatttcaccgggtgcgttattgcttggaactccaataatcttgatagtaaagttggcggcaactacaactacctgtatcgacttttccgtaaaagtaatctcaagccatttgaaagagacatcaacacaacaatttatcaggctggatctaccccatgcaacggcgttgaaggatttaactgctacttccctctccaaagttacggtttccaaccaacaaacggcgttggctatcaaccttatagagtcgttgtcctctcttttgagcttaaccatgccccagcgacagtgtgtgggccgaagaaaagcactaatttggttaagaataaatgtgttaactttaattttaatggattgacggggacaggggttctgacagagtctaacaagaaatttctgccgttccaacagtttgggcgagatattgcagataccacggacgccgttcgagacccccaaacacttgaaattctcgatataactccctgcagctttggcggtgtatccgttatcacgcccgggacaaataccagtaaccaagtcgcagtcctgtatcaagacgtaaattgtacggaagtgcccgttgctatacacgctgaccaactgactcccacatggagagtctatagtactggttctaatgtgttccaaacacgagccggttgcctgatcggagccgaacatgttaacaactcatacgaatgtgacataccgattggcgccggcatttgcgccagctatcaaacgcagaccaactcaccaagaaggcgtcgcagtgtagcaagtcaatctattatagcgtataccatgtctttgggagcagaaaactccgttgcttactctaataattctattgctatcccaaccaattttacaatctcagttactaccgaaatactgccggtaagcatgactaagacatccgtggattgcactatgtacatctgtggggactcaacagagtgtagtaatttgctgcttcaatatggctccttctgcactcaactgaatcgtgctctcacgggaattgctgttgagcaagataagaatacccaggaagtgtttgcccaagtcaaacaaatttataagacaccaccaattaaagattttggtggatttaatttcagccaaatacttccagatccctcacgcagacgacggtctttcatcgaggaccttctgttcaacaaagttactctggctgatgcaggcttcattaagcagtacggtgattgtcttggagacatcgctgcgcgcgacctcatatgcgcccagaaatttaatgggctgaccgtacttccccctttgctgactgatgagatgattgcacaatacacttccgcactccttgcgggtactatcacatccgggtggacttttggagctggcgccgctcttcaaattcccttcgccatgcaaatggcgtacaggtttaatggcatcggtgtgacacagaatgtgctctatgagaaccagaaacttatcgcaaaccagttcaattcagccatcgggaaaatccaagatagtctcagtagtactgcctcagctctcggcaagctccaggatgtagtgaatcagaatgcacaagccttgaacactctcgttaaacaactttcttccaactttggtgccatcagcagtgggcctaacgatatattgagccgcttgcccaaagtggaagcggaagtccaaatagatagacttattaccggccggctgcaatctctgcaaacctatgtgactcaacaattgatccgagctgccgaaatccgtgccagtgcaaatctcgccgcgaccaagatgagcgaatgtgtcttgggacagagcaaaagagtcgatttctgcggaaaaggctaccacctgatgtctttccctcaatctgccccgcacggagtggtctttctccatgtgacttatgtgccagcccaagaaaagaactttacaaccgcaccggcaatttgccatgacggaaaggcgcatttcccccgtgagggagtctttgtgagcaacgggacccattggttcgtgacacaacgcaatttctatgagcctcagatcattaccacggacaatactttcgtgtctggcaactgtgacgtggtcataggcatcgtgaataataccgtctacgatcccttgcaacccgaactggactcattcaaagaagagctggataagtattttaagaaccatacaagccctgatgtcgatcttggggatatatcaggcataaacgcatctgttgtgaatatccaaaaggaaattgatagattgaacgaagttgccaagaacctcaatgaaagtcttatcgacctgcaagaactgggaaaatatgagcaatatataaaatggccatggagcgggcgccggagacggagaaggggtagcggcggtagtggtagcgggtacatcccagaggcacccagagatggacaagcttacgtaaggaaggacggggaatgggtgctgctcagtacatttcttggatgataa

SEQ ID NO: 129 - RNA, 3840 nt, Artificial Sequence
  WuS_3F_D2P_Gly_pVax
ggauccgccaccauggauuggacauggauauuguucuugguugcagcagcuacccggguacauuccauguucgucuuccucguacugcucccacuugucaguagucaaugugugaacuugacuacccggacgcaguugcccccggccuacacuaauagcuuuacgcguggagucuauuaccccgacaagguguucaggucauccguccugcauagcacucaagaucucuucuugcccuucuuuaguaacgucacuugguuccaugcaauccacguaaguggcacuaauggcaccaagcgauucgacaaucccguacucccuuuuaacgaugggguguauuucgcgagcacagagaaguccaacaucauccgugguuggaucuucggcaccacacuggauucuaaaacccaaagccugcuuauaguaaauaaugcaacaaacguggucauuaaaguuugcgaauuucaguuuuguaacgaccccuuccuuggcguauauuaccacaagaacaauaaauccuggauggagagcgaauuuaggguuuacaguucagccaauaauuguacauucgaauacguaagccaacccuucuugauggaccuggaaggaaagcaaggaaauuucaagaaucuccgugaauucguguucaagaacauagacggcuauuuuaaaauauauucaaaacacacaccgauuaaccugguacgagaucuuccgcaaggauucucugcacuggaaccgcuggucgaucuuccuaucggcauuaauaucacucgguuucaaacauugcuugcuuugcaucggaguuaucuuacacccggggauagcucaaguggauggacugccggggcugcugccuauuacguaggcuaucuccaaccacggacauuccugcugaaauauaacgagaaugggacaaucacagaugcuguugacugcgcuuuggacccuuugagcgaaacaaagugcacacucaaauccuucaccguggaaaagggaaucuaccaaacgucuaauuuucgcguccaaccaaccgagagcaucgucagauucccaaacauuacuaaucuuugccccuuuggcgaagucuucaaugcuacgcgauuugcguccgucuacgcguggaaucggaagcgcauuagcaauugcgucgcagacuauuccgugcucuauaacucugcauccuuuucuaccuuuaaauguuauggagucaacgggacaaagcucaaugaccuuugcuuuacaaaugucuaugcagacucuuuugucauccguggugaugagguacgacagaucgcgccaggacaaaccgggaagaucgccgauuacaacuacaaacugcccgacgauuucaccgggugcguuauugcuuggaacuccaauaaucuugauaguaaaguuggcggcaacuacaacuaccuguaucgacuuuuccguaaaaguaaucucaagccauuugaaagagacaucaacacaacaauuuaucaggcuggaucuaccccaugcaacggcguugaaggauuuaacugcuacuucccucuccaaaguuacgguuuccaaccaacaaacggcguuggcuaucaaccuuauagagucguuguccucucuuuugagcuuaaccaugccccagcgacagugugugggccgaagaaaagcacuaauuugguuaagaauaaauguguuaacuuuaauuuuaauggauugacggggacagggguucugacagagucuaacaagaaauuucugccguuccaacaguuugggcgagauauugcagauaccacggacgccguucgagacccccaaacacuugaaauucucgauauaacucccugcagcuuuggcgguguauccguuaucacgcccgggacaaauaccaguaaccaagucgcaguccuguaucaagacguaaauuguacggaagugcccguugcuauacacgcugaccaacugacucccacauggagagucuauaguacugguucuaauguguuccaaacacgagccgguugccugaucggagccgaacauguuaacaacucauacgaaugugacauaccgauuggcgccggcauuugcgccagcuaucaaacgcagaccaacucaccaagaaggcgucgcaguguagcaagucaaucuauuauagcguauaccaugucuuugggagcagaaaacuccguugcuuacucuaauaauucuauugcuaucccaaccaauuuuacaaucucaguuacuaccgaaauacugccgguaagcaugacuaagacauccguggauugcacuauguacaucuguggggacucaacagaguguaguaauuugcugcuucaauauggcuccuucugcacucaacugaaucgugcucucacgggaauugcuguugagcaagauaagaauacccaggaaguguuugcccaagucaaacaaauuuauaagacaccaccaauuaaagauuuugguggauuuaauuucagccaaauacuuccagaucccucacgcagacgacggucuuucaucgaggaccuucuguucaacaaaguuacucuggcugaugcaggcuucauuaagcaguacggugauugucuuggagacaucgcugcgcgcgaccucauaugcgcccagaaauuuaaugggcugaccguacuucccccuuugcugacugaugagaugauugcacaauacacuuccgcacuccuugcggguacuaucacauccggguggacuuuuggagcuggcgccgcucuucaaauucccuucgccaugcaaauggcguacagguuuaauggcaucggugugacacagaaugugcucuaugagaaccagaaacuuaucgcaaaccaguucaauucagccaucgggaaaauccaagauagucucaguaguacugccucagcucucggcaagcuccaggauguagugaaucagaaugcacaagccuugaacacucucguuaaacaacuuucuuccaacuuuggugccaucagcagugggccuaacgauauauugagccgcuugcccaaaguggaagcggaaguccaaauagauagacuuauuaccggccggcugcaaucucugcaaaccuaugugacucaacaauugauccgagcugccgaaauccgugccagugcaaaucucgccgcgaccaagaugagcgaaugugucuugggacagagcaaaagagucgauuucugcggaaaaggcuaccaccugaugucuuucccucaaucugccccgcacggaguggucuuucuccaugugacuuaugugccagcccaagaaaagaacuuuacaaccgcaccggcaauuugccaugacggaaaggcgcauuucccccgugagggagucuuugugagcaacgggacccauugguucgugacacaacgcaauuucuaugagccucagaucauuaccacggacaauacuuucgugucuggcaacugugacguggucauaggcaucgugaauaauaccgucuacgaucccuugcaacccgaacuggacucauucaaagaagagcuggauaaguauuuuaagaaccauacaagcccugaugucgaucuuggggauauaucaggcauaaacgcaucuguugugaauauccaaaaggaaauugauagauugaacgaaguugccaagaaccucaaugaaagucuuaucgaccugcaagaacugggaaaauaugagcaauauauaaaauggccauggagcgggcgccggagacggagaagggguagcggcgguagugguagcggguacaucccagaggcacccagagauggacaagcuuacguaaggaaggacggggaaugggugcugcucaguacauuucuuggaugauaa

SEQ ID NO: 130 - protein, 1274 aa, Artificial Sequence; identical to SEQ ID NO: 124
  WuS_3F_D2P_Gly_pVax

SEQ ID NO: 131 - DNA, 3840 bp, Artificial Sequence
  WuS_3F_D2P_rB_pVax
ggatccgccaccatggattggacatggattctgtttctcgttgccgccgctacgcgcgtgcacagcatgttcgttttcctcgtactgttgcctctggtatcatctcaatgtgtgaatcttacgacgaggacgcaactgccaccagcttacaccaactcttttactagaggggtctattaccccgacaaggttttcagatcctcagtgctgcatagtacacaagatttgtttcttcccttcttctccaatgtcacttggtttcacgctatccacgtgtccggcactaatggaacgaagcggtttgataacccggtacttccatttaatgacggggtatactttgcaagcaccgagaaaagtaatatcattcgtgggtggatctttggcactacactcgactccaagacacaatcccttttgatagtaaataatgctacaaatgtggttataaaggtgtgcgagtttcaattctgcaatgaccccttcctcggtgtctattatcacaagaacaataaatcttggatggaaagtgagttcagggtatacagctctgcaaacaactgcacatttgagtatgtgagccaaccgtttcttatggatctggaaggtaagcagggtaactttaagaaccttcgggagttcgtctttaagaatatagatggctattttaaaatctatagtaaacacactcctattaaccttgtgcgcgatctccctcaagggttctctgcattggaaccgcttgttgatttgcctataggaatcaatattacacgatttcaaacactcctcgctctccataggagctaccttaccccaggcgactcaagctctggttggacggcaggagctgcagcatactatgtgggttatcttcagccgcggacattcttgcttaagtataatgagaatggaactatcactgacgctgttgactgtgccctggaccctctttcagaaacaaaatgtactctcaaatcattcaccgtggagaagggaatatatcaaacaagtaactttagggtccaacctaccgagagcatcgtgcgattccctaatattaccaatttgtgtcccttcggtgaagtcttcaacgcgacccgctttgctagcgtctatgcgtggaacaggaagcgaattagcaactgtgttgcagattacagtgtgctgtacaatagtgcgagcttttccacgttcaaatgctatggcgtgaaacctaccaaacttaatgatttgtgcttcactaatgtttatgctgacagcttcgttatccggggtgatgaggtgaggcagattgcccccggtcaaactggcaaaattgccgactacaattacaagctccctgatgattttactggatgtgtcatagcgtggaattccaataatctggactctaaggttggtggtaattataactatctctaccgcctgtttcgtaagagcaatctgaaaccctttgaaagagatatttggactgagatatatcaagctggctcaactccttgcaacggggtcgaaggtttcaattgttactttccacttcaatcatacgggtttcaaccaactaacggtgtaggttatcaaccctatcgggtggttgtcctgagctttgagctgaaccatgccccggctacagtatgcggcccaaagaaatccactaacttggtcaagaacaaatgcgtcaactttaactttaacggactcacggggacaggagtccttaccgaatccaacaagaaattcttgcctttccaacaatttggacgagacattgcggataccacagacgcagtacgcgacccacagactcttgaaatcctcgacataacaccctgcagtttcggcggtgtaagtgtcattaccccaggcactaatacgagcaaccaagtggcggtgctctaccaagacgttaattgcactgaggtcccagtggctattcacgctgaccaacttacacccacatggagagtgtatagtacaggctcaaacgtcttccagacacgggcggggtgccttattggagcagaacatgttaacaattcctatgaatgcgatatcccgattggagccgggatctgtgctagctatcaaacccaaacaaatagccccagacgtcgacgttccgtggctagtcaaagcatcatcgcctacactatgagtcttggggccgaaaattccgttgcttacagtaacaacagtatcgctatccccaccaattttactattagtgtaactacagagattctgccggtttccatgacaaagacttccgtggattgtacgatgtatatttgcggcgacagcacagagtgcagcaatctgctgctgcaatacggtagtttctgcacccaattgaaccgtgctctgacgggaattgcagttgagcaggacaagaatactcaagaagtatttgcacaagtcaaacagatatacaagacgcccccgattaaagatttcggcgggtttaactttagccaaattcttccggaccccagcagacgccgccgaagctttattgaggacctgctgtttaataaagttacccttgctgatgctggttttatcaagcaatacggagattgcctgggagatatcgccgccagggatttgatctgtgcgcaaaagtttaacggccttaccgttctcccgccccttctgaccgatgaaatgatagcccaatacacttccgcactcctggcaggcacaattacttccggctggacgtttggggccggggcagccttgcaaattccgtttgctatgcaaatggcatatcgtttcaatggtatcggcgtaacacaaaatgtcctttatgagaaccagaaactcattgctaatcagtttaattccgctatcggcaagattcaagacagtctcagcagcacggcgagcgcacttggtaaacttcaagacgttgtcaaccagaatgctcaagccctgaacactctggtaaaacaacttagctctaatttcggtgcaattagctccggtccgaacgatattctgtcacggctcccgaaagtcgaagccgaagtccagatcgataggctgatcacagggcgcttgcagagtctccaaacctacgtgacgcaacaactcattcgggcggctgaaattcgtgcaagcgctaatctggccgctaccaaaatgagtgagtgtgttctcggtcaatcaaagagggttgacttttgcggcaaaggatatcatttgatgagttttccgcaatctgcccctcatggggtagtatttctgcacgtaacttatgtaccagcacaagaaaagaacttcaccacggccccagcaatatgccacgatggcaaagctcatttccctcgcgaaggggtctttgtaagcaatggaacccactggtttgtcacacaacgcaacttttatgagcctcaaatcattacaaccgataacacttttgtctccgggaactgcgacgtggtgattggaatcgtcaacaacactgtctatgatcccctgcaacctgaactggattcctttaaagaagagcttgataagtatttcaagaaccataccagccccgacgtcgatttgggagatattagtgggattaatgctagcgttgttaatatacaaaaggaaatagatcgattgaatgaagtggccaagaatctgaatgagtctctgattgacctgcaggagctcggaaagtatgagcaatatataaaatggccctggtcaggccgcaggcgtcggcggcgcggtagcggcggttcaggatctgggtatatacctgaggccccacgagatgggcaggcttatgtacggaaagatggagaatgggtgttgctgagtactttcctcgggtaataa

SEQ ID NO: 132 - RNA, 3840 nt, Artificial Sequence
  WuS_3F_D2P_rB_pVax
ggauccgccaccauggauuggacauggauucuguuucucguugccgccgcuacgcgcgugcacagcauguucguuuuccucguacuguugccucugguaucaucucaaugugugaaucuuacgacgaggacgcaacugccaccagcuuacaccaacucuuuuacuagaggggucuauuaccccgacaagguuuucagauccucagugcugcauaguacacaagauuuguuucuucccuucuucuccaaugucacuugguuucacgcuauccacguguccggcacuaauggaacgaagcgguuugauaacccgguacuuccauuuaaugacgggguauacuuugcaagcaccgagaaaaguaauaucauucguggguggaucuuuggcacuacacucgacuccaagacacaaucccuuuugauaguaaauaaugcuacaaaugugguuauaaaggugugcgaguuucaauucugcaaugaccccuuccucggugucuauuaucacaagaacaauaaaucuuggauggaaagugaguucaggguauacagcucugcaaacaacugcacauuugaguaugugagccaaccguuucuuauggaucuggaagguaagcaggguaacuuuaagaaccuucgggaguucgucuuuaagaauauagauggcuauuuuaaaaucuauaguaaacacacuccuauuaaccuugugcgcgaucucccucaaggguucucugcauuggaaccgcuuguugauuugccuauaggaaucaauauuacacgauuucaaacacuccucgcucuccauaggagcuaccuuaccccaggcgacucaagcucugguuggacggcaggagcugcagcauacuauguggguuaucuucagccgcggacauucuugcuuaaguauaaugagaauggaacuaucacugacgcuguugacugugcccuggacccucuuucagaaacaaaauguacucucaaaucauucaccguggagaagggaauauaucaaacaaguaacuuuaggguccaaccuaccgagagcaucgugcgauucccuaauauuaccaauuugugucccuucggugaagucuucaacgcgacccgcuuugcuagcgucuaugcguggaacaggaagcgaauuagcaacuguguugcagauuacagugugcuguacaauagugcgagcuuuuccacguucaaaugcuauggcgugaaaccuaccaaacuuaaugauuugugcuucacuaauguuuaugcugacagcuucguuauccggggugaugaggugaggcagauugcccccggucaaacuggcaaaauugccgacuacaauuacaagcucccugaugauuuuacuggaugugucauagcguggaauuccaauaaucuggacucuaagguuggugguaauuauaacuaucucuaccgccuguuucguaagagcaaucugaaacccuuugaaagagauauuuggacugagauauaucaagcuggcucaacuccuugcaacggggucgaagguuucaauuguuacuuuccacuucaaucauacggguuucaaccaacuaacgguguagguuaucaacccuaucgggugguuguccugagcuuugagcugaaccaugccccggcuacaguaugcggcccaaagaaauccacuaacuuggucaagaacaaaugcgucaacuuuaacuuuaacggacucacggggacaggaguccuuaccgaauccaacaagaaauucuugccuuuccaacaauuuggacgagacauugcggauaccacagacgcaguacgcgacccacagacucuugaaauccucgacauaacacccugcaguuucggcgguguaagugucauuaccccaggcacuaauacgagcaaccaaguggcggugcucuaccaagacguuaauugcacugaggucccaguggcuauucacgcugaccaacuuacacccacauggagaguguauaguacaggcucaaacgucuuccagacacgggcggggugccuuauuggagcagaacauguuaacaauuccuaugaaugcgauaucccgauuggagccgggaucugugcuagcuaucaaacccaaacaaauagccccagacgucgacguuccguggcuagucaaagcaucaucgccuacacuaugagucuuggggccgaaaauuccguugcuuacaguaacaacaguaucgcuauccccaccaauuuuacuauuaguguaacuacagagauucugccgguuuccaugacaaagacuuccguggauuguacgauguauauuugcggcgacagcacagagugcagcaaucugcugcugcaauacgguaguuucugcacccaauugaaccgugcucugacgggaauugcaguugagcaggacaagaauacucaagaaguauuugcacaagucaaacagauauacaagacgcccccgauuaaagauuucggcggguuuaacuuuagccaaauucuuccggaccccagcagacgccgccgaagcuuuauugaggaccugcuguuuaauaaaguuacccuugcugaugcugguuuuaucaagcaauacggagauugccugggagauaucgccgccagggauuugaucugugcgcaaaaguuuaacggccuuaccguucucccgccccuucugaccgaugaaaugauagcccaauacacuuccgcacuccuggcaggcacaauuacuuccggcuggacguuuggggccggggcagccuugcaaauuccguuugcuaugcaaauggcauaucguuucaaugguaucggcguaacacaaaauguccuuuaugagaaccagaaacucauugcuaaucaguuuaauuccgcuaucggcaagauucaagacagucucagcagcacggcgagcgcacuugguaaacuucaagacguugucaaccagaaugcucaagcccugaacacucugguaaaacaacuuagcucuaauuucggugcaauuagcuccgguccgaacgauauucugucacggcucccgaaagucgaagccgaaguccagaucgauaggcugaucacagggcgcuugcagagucuccaaaccuacgugacgcaacaacucauucgggcggcugaaauucgugcaagcgcuaaucuggccgcuaccaaaaugagugaguguguucucggucaaucaaagaggguugacuuuugcggcaaaggauaucauuugaugaguuuuccgcaaucugccccucaugggguaguauuucugcacguaacuuauguaccagcacaagaaaagaacuucaccacggccccagcaauaugccacgauggcaaagcucauuucccucgcgaaggggucuuuguaagcaauggaacccacugguuugucacacaacgcaacuuuuaugagccucaaaucauuacaaccgauaacacuuuugucuccgggaacugcgacguggugauuggaaucgucaacaacacugucuaugauccccugcaaccugaacuggauuccuuuaaagaagagcuugauaaguauuucaagaaccauaccagccccgacgucgauuugggagauauuagugggauuaaugcuagcguuguuaauauacaaaaggaaauagaucgauugaaugaaguggccaagaaucugaaugagucucugauugaccugcaggagcucggaaaguaugagcaauauauaaaauggcccuggucaggccgcaggcgucggcggcgcgguagcggcgguucaggaucuggguauauaccugaggccccacgagaugggcaggcuuauguacggaaagauggagaauggguguugcugaguacuuuccucggguaauaa

SEQ ID NO: 133 - protein, 1274 aa, Artificial Sequence
  WuS_3F_D2P_rB_pVax
MDWTWILFLVAAATRVHSMFVFLVLLPLVSSQCVNLTTRTQLPPAYTNSFTRGVYYPDKVFRSSVLHSTQDLFLPFFSNVTWFHAIHVSGTNGTKRFDNPVLPFNDGVYFASTEKSNIIRGWIFGTTLDSKTQSLLIVNNATNVVIKVCEFQFCNDPFLGVYYHKNNKSWMESEFRVYSSANNCTFEYVSQPFLMDLEGKQGNFKNLREFVFKNIDGYFKIYSKHTPINLVRDLPQGFSALEPLVDLPIGINITRFQTLLALHRSYLTPGDSSSGWTAGAAAYYVGYLQPRTFLLKYNENGTITDAVDCALDPLSETKCTLKSFTVEKGIYQTSNFRVQPTESIVRFPNITNLCPFGEVFNATRFASVYAWNRKRISNCVADYSVLYNSASFSTFKCYGVKPTKLNDLCFTNVYADSFVIRGDEVRQIAPGQTGKIADYNYKLPDDFTGCVIAWNSNNLDSKVGGNYNYLYRLFRKSNLKPFERDIWTEIYQAGSTPCNGVEGFNCYFPLQSYGFQPTNGVGYQPYRVVVLSFELNHAPATVCGPKKSTNLVKNKCVNFNFNGLTGTGVLTESNKKFLPFQQFGRDIADTTDAVRDPQTLEILDITPCSFGGVSVITPGTNTSNQVAVLYQDVNCTEVPVAIHADQLTPTWRVYSTGSNVFQTRAGCLIGAEHVNNSYECDIPIGAGICASYQTQTNSPRRRRSVASQSIIAYTMSLGAENSVAYSNNSIAIPTNFTISVTTEILPVSMTKTSVDCTMYICGDSTECSNLLLQYGSFCTQLNRALTGIAVEQDKNTQEVFAQVKQIYKTPPIKDFGGFNFSQILPDPSRRRRSFIEDLLFNKVTLADAGFIKQYGDCLGDIAARDLICAQKFNGLTVLPPLLTDEMIAQYTSALLAGTITSGWTFGAGAALQIPFAMQMAYRFNGIGVTQNVLYENQKLIANQFNSAIGKIQDSLSSTASALGKLQDVVNQNAQALNTLVKQLSSNFGAISSGPNDILSRLPKVEAEVQIDRLITGRLQSLQTYVTQQLIRAAEIRASANLAATKMSECVLGQSKRVDFCGKGYHLMSFPQSAPHGVVFLHVTYVPAQEKNFTTAPAICHDGKAHFPREGVFVSNGTHWFVTQRNFYEPQIITTDNTFVSGNCDVVIGIVNNTVYDPLQPELDSFKEELDKYFKNHTSPDVDLGDISGINASVVNIQKEIDRLNEVAKNLNESLIDLQELGKYEQYIKWPWSGRRRRRRGSGGSGSGYIPEAPRDGQAYVRKDGEWVLLSTFLG

SEQ ID NO: 134 - DNA, 3840 bp, Artificial Sequence
  WuS_3F_D2P_pVax
ggatccgccaccatggactggacctggatactctttctcgtagcagcagccacacgagtgcattcaatgtttgtcttcttggtcctcttgccactggttagctcccagtgtgtgaatcttactacaaggacacaactgcccccagcttacacaaactcctttactaggggtgtatattacccagacaaagtgtttcgcagttctgtcctgcatagcacccaagaccttttccttccgttcttcagcaacgtcacctggttccatgctatccatgtcagtggaacgaatggcacaaagcggttcgataaccctgtcctgccctttaacgacggcgtctatttcgcttcaacagagaagagtaacattatcagaggatggatatttggtacaactcttgatagcaagacacaaagcctgctgattgtaaacaacgcgacaaatgtcgtcatcaaggtttgcgagtttcaattttgcaacgatcccttcttgggcgtgtactatcataagaacaataaaagctggatggagagcgaatttagggtgtatagctcagctaataactgtacatttgaatatgtctctcaacccttcctcatggaccttgagggaaagcaaggaaatttcaagaatctcagagaatttgtcttcaagaacatcgacgggtatttcaagatctactccaagcatacacccatcaacttggttagggaccttccgcaaggtttctcagcactggagcctctggtagatctccctattgggattaatattacaagatttcaaacactcctggccttgcatagatcctatcttacccctggggattccagctcaggttggaccgcgggtgccgcggcgtactatgtcggatatctccaacctcggacattcctgctgaaatacaatgaaaatgggaccatcactgatgccgttgattgtgctctcgatcctctgagtgagaccaaatgcactcttaagagttttacagtggagaaaggtatctatcaaactagtaatttcagagttcaaccaaccgagtcaatagtgcgttttccaaatatcactaatctgtgtccatttggggaagtcttcaatgctacccgattcgcaagtgtgtacgcctggaaccggaaacggatttctaactgcgttgccgattatagtgtcctctataattctgcttctttctctacttttaagtgctatggggtgtcccccaccaagctgaacgatctgtgtttcactaacgtctacgccgatagttttgtcattagaggggacgaggtacggcaaatcgcgcccggccaaacggggaaaattgccgattacaactacaagcttccagacgacttcacaggttgcgtgattgcatggaattctaataatctggacagtaaagtgggcggcaactataactatctttaccggctgtttcggaagagcaacttgaagcccttcgaacgcgacatatccaccgagatctatcaagccggaagtaccccgtgcaacggggtagaaggatttaattgttattttccattgcagtcttatggatttcagcccaccaatggtgtgggataccaaccttatagggttgttgttctctccttcgaactcctgcacgctccagctactgtatgtgggcctaagaaaagtactaatctcgttaagaataaatgcgtcaatttcaatttcaacggcttgaccgggactggagtgctcaccgaaagcaacaagaagtttctcccgtttcagcaattcggtagggatattgccgatacgacagatgcagtacgagatccccaaacactcgaaatcctggacattacgccatgtagctttggcggagtaagtgtcatcaccccagggactaacaccagtaaccaagttgcggtactctatcaggatgtgaactgcactgaggtacctgtagcaattcacgcagaccaattgacgccgacgtggcgcgtctatagtacaggaagtaacgtctttcagacaagagcgggttgtttgattggcgctgaacacgttaacaattcttacgagtgtgatatccccatcggtgcggggatctgcgccagctatcagacacaaaccaattccccacgaaggagacgttccgtggccagccagtcaataatcgcgtatactatgtctctgggtgcggagaattcagtggcctattccaataattctatagccattccaaccaattttactataagcgtcactacagagatcttgccagttagcatgacgaaaaccagcgtcgattgtaccatgtatatatgcggcgacagtaccgaatgctcaaatctgctgctccaatatggctcattttgcactcaacttaatagagctctgacagggatcgctgtcgaacaagataagaacactcaggaagttttcgcccaagttaagcagatatacaagaccccgcccatcaaggattttggcggatttaatttctctcagatcctgccggaccctagccgccgacgccggagctttatcgaagacttgctgtttaataaggttactctcgcagatgcaggcttcatcaagcaatacggtgactgccttggggatatcgctgctcgggacctgatctgtgctcagaaattcaacggtctcacggtgctgcccccactcctgaccgacgaaatgattgcccagtatacgtccgcattgctcgctggcaccatcactagcggctggacctttggggccggagccgcgctccaaataccttttgctatgcaaatggcttatcgcttcaatggtattggggttacgcaaaatgtcctctacgaaaatcaaaagctcatagctaaccaattcaatagcgctatagggaaaattcaagacagcctgagttccacagcaagcgccctcggcaaacttcaagatgtagtgaaccaaaatgctcaagcactcaatacactggtcaaacaactctcaagcaatttcggggcaatctcatctggtcctaatgacatattgagcaggctccccaaagtggaagcagaagtacaaatcgacaggctgattaccggacgactccaaagcttgcaaacttatgtaacccaacaacttatcagggctgcagaaatccgtgcaagcgctaacctcgccgctacgaagatgtcagaatgtgtacttgggcagtctaagagggttgatttctgtggaaaagggtaccatctgatgagttttccacagagcgctccacatggggtggtgtttctgcatgtaacctatgttcccgctcaagaaaagaattttactactgcccccgcaatttgccatgacgggaaagcccatttcccccgagagggagttttcgtgagtaacggaacgcactggtttgtcactcagagaaatttctacgagccccaaatcattacgaccgataatacattcgtaagcggtaactgcgatgtcgtcattggcatcgttaacaacactgtttatgatccccttcaacccgagcttgactcatttaaagaggaactggataagtactttaagaatcacacctctcccgatgtcgacctgggcgacatctctggaattaatgcctctgtcgtaaacatccaaaaggaaattgaccgactgaatgaggtggcaaagaatcttaatgaatccctgatcgatctgcaggagcttgggaagtatgagcaatacatcaaatggccatggtctggcagacggcgccggagaaggggctctggcggctctggaagcgggtatattccagaggcgcccagggatgggcaagcatatgttcggaaggatggggagtgggtgttgttgtccacgttccttggctagtga

SEQ ID NO: 135 - RNA, 3840 nt, Artificial Sequence
  WuS_3F_D2P_pVax
ggauccgccaccauggacuggaccuggauacucuuucucguagcagcagccacacgagugcauucaauguuugucuucuugguccucuugccacugguuagcucccagugugugaaucuuacuacaaggacacaacugcccccagcuuacacaaacuccuuuacuagggguguauauuacccagacaaaguguuucgcaguucuguccugcauagcacccaagaccuuuuccuuccguucuucagcaacgucaccugguuccaugcuauccaugucaguggaacgaauggcacaaagcgguucgauaacccuguccugcccuuuaacgacggcgucuauuucgcuucaacagagaagaguaacauuaucagaggauggauauuugguacaacucuugauagcaagacacaaagccugcugauuguaaacaacgcgacaaaugucgucaucaagguuugcgaguuucaauuuugcaacgaucccuucuugggcguguacuaucauaagaacaauaaaagcuggauggagagcgaauuuaggguguauagcucagcuaauaacuguacauuugaauaugucucucaacccuuccucauggaccuugagggaaagcaaggaaauuucaagaaucucagagaauuugucuucaagaacaucgacggguauuucaagaucuacuccaagcauacacccaucaacuugguuagggaccuuccgcaagguuucucagcacuggagccucugguagaucucccuauugggauuaauauuacaagauuucaaacacuccuggccuugcauagauccuaucuuaccccuggggauuccagcucagguuggaccgcgggugccgcggcguacuaugucggauaucuccaaccucggacauuccugcugaaauacaaugaaaaugggaccaucacugaugccguugauugugcucucgauccucugagugagaccaaaugcacucuuaagaguuuuacaguggagaaagguaucuaucaaacuaguaauuucagaguucaaccaaccgagucaauagugcguuuuccaaauaucacuaaucuguguccauuuggggaagucuucaaugcuacccgauucgcaaguguguacgccuggaaccggaaacggauuucuaacugcguugccgauuauaguguccucuauaauucugcuucuuucucuacuuuuaagugcuauggggugucccccaccaagcugaacgaucuguguuucacuaacgucuacgccgauaguuuugucauuagaggggacgagguacggcaaaucgcgcccggccaaacggggaaaauugccgauuacaacuacaagcuuccagacgacuucacagguugcgugauugcauggaauucuaauaaucuggacaguaaagugggcggcaacuauaacuaucuuuaccggcuguuucggaagagcaacuugaagcccuucgaacgcgacauauccaccgagaucuaucaagccggaaguaccccgugcaacgggguagaaggauuuaauuguuauuuuccauugcagucuuauggauuucagcccaccaauggugugggauaccaaccuuauaggguuguuguucucuccuucgaacuccugcacgcuccagcuacuguaugugggccuaagaaaaguacuaaucucguuaagaauaaaugcgucaauuucaauuucaacggcuugaccgggacuggagugcucaccgaaagcaacaagaaguuucucccguuucagcaauucgguagggauauugccgauacgacagaugcaguacgagauccccaaacacucgaaauccuggacauuacgccauguagcuuuggcggaguaagugucaucaccccagggacuaacaccaguaaccaaguugcgguacucuaucaggaugugaacugcacugagguaccuguagcaauucacgcagaccaauugacgccgacguggcgcgucuauaguacaggaaguaacgucuuucagacaagagcggguuguuugauuggcgcugaacacguuaacaauucuuacgagugugauauccccaucggugcggggaucugcgccagcuaucagacacaaaccaauuccccacgaaggagacguuccguggccagccagucaauaaucgcguauacuaugucucugggugcggagaauucaguggccuauuccaauaauucuauagccauuccaaccaauuuuacuauaagcgucacuacagagaucuugccaguuagcaugacgaaaaccagcgucgauuguaccauguauauaugcggcgacaguaccgaaugcucaaaucugcugcuccaauauggcucauuuugcacucaacuuaauagagcucugacagggaucgcugucgaacaagauaagaacacucaggaaguuuucgcccaaguuaagcagauauacaagaccccgcccaucaaggauuuuggcggauuuaauuucucucagauccugccggacccuagccgccgacgccggagcuuuaucgaagacuugcuguuuaauaagguuacucucgcagaugcaggcuucaucaagcaauacggugacugccuuggggauaucgcugcucgggaccugaucugugcucagaaauucaacggucucacggugcugcccccacuccugaccgacgaaaugauugcccaguauacguccgcauugcucgcuggcaccaucacuagcggcuggaccuuuggggccggagccgcgcuccaaauaccuuuugcuaugcaaauggcuuaucgcuucaaugguauugggguuacgcaaaauguccucuacgaaaaucaaaagcucauagcuaaccaauucaauagcgcuauagggaaaauucaagacagccugaguuccacagcaagcgcccucggcaaacuucaagauguagugaaccaaaaugcucaagcacucaauacacuggucaaacaacucucaagcaauuucggggcaaucucaucugguccuaaugacauauugagcaggcuccccaaaguggaagcagaaguacaaaucgacaggcugauuaccggacgacuccaaagcuugcaaacuuauguaacccaacaacuuaucagggcugcagaaauccgugcaagcgcuaaccucgccgcuacgaagaugucagaauguguacuugggcagucuaagaggguugauuucuguggaaaaggguaccaucugaugaguuuuccacagagcgcuccacauggggugguguuucugcauguaaccuauguucccgcucaagaaaagaauuuuacuacugcccccgcaauuugccaugacgggaaagcccauuucccccgagagggaguuuucgugaguaacggaacgcacugguuugucacucagagaaauuucuacgagccccaaaucauuacgaccgauaauacauucguaagcgguaacugcgaugucgucauuggcaucguuaacaacacuguuuaugauccccuucaacccgagcuugacucauuuaaagaggaacuggauaaguacuuuaagaaucacaccucucccgaugucgaccugggcgacaucucuggaauuaaugccucugucguaaacauccaaaaggaaauugaccgacugaaugagguggcaaagaaucuuaaugaaucccugaucgaucugcaggagcuugggaaguaugagcaauacaucaaauggccauggucuggcagacggcgccggagaaggggcucuggcggcucuggaagcggguauauuccagaggcgcccagggaugggcaagcauauguucggaaggauggggaguggguguuguuguccacguuccuuggcuaguga

SEQ ID NO: 136 - protein, 1274 aa, Artificial Sequence
  WuS_3F_D2P_pVax
MDWTWILFLVAAATRVHSMFVFLVLLPLVSSQCVNLTTRTQLPPAYTNSFTRGVYYPDKVFRSSVLHSTQDLFLPFFSNVTWFHAIHVSGTNGTKRFDNPVLPFNDGVYFASTEKSNIIRGWIFGTTLDSKTQSLLIVNNATNVVIKVCEFQFCNDPFLGVYYHKNNKSWMESEFRVYSSANNCTFEYVSQPFLMDLEGKQGNFKNLREFVFKNIDGYFKIYSKHTPINLVRDLPQGFSALEPLVDLPIGINITRFQTLLALHRSYLTPGDSSSGWTAGAAAYYVGYLQPRTFLLKYNENGTITDAVDCALDPLSETKCTLKSFTVEKGIYQTSNFRVQPTESIVRFPNITNLCPFGEVFNATRFASVYAWNRKRISNCVADYSVLYNSASFSTFKCYGVSPTKLNDLCFTNVYADSFVIRGDEVRQIAPGQTGKIADYNYKLPDDFTGCVIAWNSNNLDSKVGGNYNYLYRLFRKSNLKPFERDISTEIYQAGSTPCNGVEGFNCYFPLQSYGFQPTNGVGYQPYRVVVLSFELLHAPATVCGPKKSTNLVKNKCVNFNFNGLTGTGVLTESNKKFLPFQQFGRDIADTTDAVRDPQTLEILDITPCSFGGVSVITPGTNTSNQVAVLYQDVNCTEVPVAIHADQLTPTWRVYSTGSNVFQTRAGCLIGAEHVNNSYECDIPIGAGICASYQTQTNSPRRRRSVASQSIIAYTMSLGAENSVAYSNNSIAIPTNFTISVTTEILPVSMTKTSVDCTMYICGDSTECSNLLLQYGSFCTQLNRALTGIAVEQDKNTQEVFAQVKQIYKTPPIKDFGGFNFSQILPDPSRRRRSFIEDLLFNKVTLADAGFIKQYGDCLGDIAARDLICAQKFNGLTVLPPLLTDEMIAQYTSALLAGTITSGWTFGAGAALQIPFAMQMAYRFNGIGVTQNVLYENQKLIANQFNSAIGKIQDSLSSTASALGKLQDVVNQNAQALNTLVKQLSSNFGAISSGPNDILSRLPKVEAEVQIDRLITGRLQSLQTYVTQQLIRAAEIRASANLAATKMSECVLGQSKRVDFCGKGYHLMSFPQSAPHGVVFLHVTYVPAQEKNFTTAPAICHDGKAHFPREGVFVSNGTHWFVTQRNFYEPQIITTDNTFVSGNCDVVIGIVNNTVYDPLQPELDSFKEELDKYFKNHTSPDVDLGDISGINASVVNIQKEIDRLNEVAKNLNESLIDLQELGKYEQYIKWPWSGRRRRRRGSGGSGSGYIPEAPRDGQAYVRKDGEWVLLSTFLG

SEQ ID NO: 137 - DNA, 3840 bp, Artificial Sequence
  WuS_3F_2P_GlyDSol_pVax
ggatccgccaccatggactggacatggattttgtttcttgtggcggctgcaacgcgagttcattccatgtttgttttcctggttctcttgccgctcgtctctagtcaatgcgtcaatctgacgacaagaacgcaacttccccctgcctacaccaatagttttacccgtggcgtctattatccagataaagtgtttcgaagttcctgccttcattccacgcaagatctcttccttccattcttctctaatgtcacctggtttcatgcgatccacgtgtctggaaccaacgggactaaacgattcgacaatcccgtcctgccatttaacgatggagtatacttcgcatccaccgagaaatctggcattataagagggtggatattcgggactacactcgacagcaagacacaaagtctcctgattgttaacaacgcgacaaacgtcgtaattaaagtttgcgaatttcaattttgtaatgacccgttcttgggcgtgtattatcacaagaataacaaaagttggatggaatccgaattccgggtttattccagcgcgaataattgcacatttgaatacgttagccaacctttcctgatggatctcgaaggcaaacaaggaaactttaagaatcttcgggaattcgttttcaagaacatcgacgggtactttaagatatactcaaaacacaccccaattaatttggtccgagatctgccgcaaggctttagtgcgcttgagcccctcgtagatctcccaattggtattaatatcacacgctttcaaaccctgctggcattgcatcggagctatctgactcccggcgatagttcttcagggtggacggcgggtgccgctgcttactatgtaggctatctgcagcctcgtacatttctcctcaaatacaatgaaaatggcactattaccgacgccgttgattgcgctctggacccactgagcgagactaaatgcaccctcaaatcattcactgttgagaagggaatttaccaaacatcaaacttcagggtccaacctacggaaagcatcgtgcggttccccaacatcactaacctctgcccctttggagaagtatttaacgctacaaggttcgcttccgtctacgcctggaacaggaaaagaatcagtaattgcgtggctgattactccgtgctgtacaattccgcctcattttctacatttaagtgttatggcgttaacgggactaagcttaacgacctctgcttcacaaacgtctatgccgacagctttgtcattcgcggggatgaagtaagacagatagcacccggtcaaactggcaaaattgctgattacaattacaagttgccagatgatttcactggatgcgttatagcatggaactctaacaaccttgactcaaaggttggtggcaactataattatttgtatcgcctgtttcgcaaatctaatctcaagcctttcgagcgcgacataaatacgaccatataccaagcggggtccaccccttgtaatggagtcgaggggtttaattgctattttccgttgcaatcctacgggttccaaccaacaaacggcgtcggctatcaaccctatcgggttgtcgtactctcattcgagctcaaccatgcaccagcaacagtttgtggccccaagaagagcacaaatttggtcaagaataaatgcgttaattttaatttcaatggtctgactggcacaggggttcttaccgaatcaaataagaagtttctgccatttcagcagttcggaagggactgtgcagggaccacagatgccgttagagacccccaaacactcgaaattctggacatcacgccatgcagtttcggtggtgttagcgtgattactccgggtactaatacgtccaaccaagtggctgtgttgtatcaagacgttaactgtaccgaagttcctgtagcaatccatgccggtcaactgacccccacgtggcgagtttatagcaccggttccaacgtctttcaaacaagagccggatgtctcataggcgctgaacatgtgaataattcatacgaatgtgacattccaatcggcgcagggatttgcgcctcatatcagacacaaactaactccccgagaagacgtcgctcagtggcgtcacaaagcatcatcgcttatacgatgagcctctgcgccgagaactctgtcgcatattctaacaactctattgcaattcctacaaattttacaatttcttgcactactgagatcctgcccgtaagcatgacgaaaacatcctgcgactgcacaatgtatatctgtggcgactcaactgagtgctccaatctcctcttgcaatacggatctttctgtactcaactcaacagagcacttacaggaatagccgtcgaacaagacaagaacacacaagaggtcttcgcccaagtaaagcaatgttacaaaaccccacctattaaagactttggtgggtttaatttctcacagattcttccagatccttcccgtagaaggagaagctttattgaagacctcttgtttaataaagtcactcttgcagacgctgggtttattaaacaatatggagactgcttgggagacatagcggcaagagacctgatctgcgctcaaaagtttaatgggtgcactgtgttgccaccccttctgaccgacgagatgatcgctcagtataccagtgccttgctggcagggaccataactagcggatggactttcggtgcaggagctgctctgcaaatcccttttgcgatgcaaatggcctacaggtttaatggtataggagttactcagaatgtcctgtacgaaaatcaaaagctgatcgccaatcaattcaacagtgctattgggaaaatacaggacagtttgagttcaacagcgagcgctctcggcaaactgcaggatgttgtgaatcaaaacgcgcaagctttgaacactcttgtgaagcagctttcatccaacttcggagcgatctcatccgtcctgaacgacatattgtcaagacttgacccacctgaagcggaagttcagatagaccgactcataacgggccgacttcagtccttgcagacatacgtgacccaacaacttatccgcgcagccgaaataagggcttcagctaaccttgcagcaaccaaaatgtcagagtgcgtgctcggtcaaagcaagcgggtagacttttgtggcaaggggtatcatcttatgtcctttcctcaatccgcccctcacggggtggtcttcttgcactgcacttatgtacctgctcaagagaagaattttacgaccgcccctgcgatctgtcacgacgggaaagcacatttcccccgcgagggagtctttgtgtctaatggtactcattggtttgttacgcagcggaacttttacgaacctcaaataattacaacggataatacagatgttagtgggaattgcgacgtggtgatcggtatagtcaacaatacggtgtatgatccacttcaaccagaacttgattcctttaaggaagagctggacaaatatttcaagaaccatacatcccctgacgtggaccttggcgatataagcggcattaatgcttcagtggtcaatatacaaaaggaaatcgatcgcctgaatgaggtcgcaaagaatttgaatgagtccctgatcgacctgcaagagctcgggaaatatgagcagtacatcaagtggccctggtcaggtagacgtaggcggcgccggggcagtggcggctcagggagcggttatatacccgaagcccctagagatgggcaagcttatgtccgaaaggacggcgaatgggtgctcctttccactttcttgggataatag

SEQ ID NO: 138 - RNA, 3840 nt, Artificial Sequence
  WuS_3F_2P_GlyDSol_pVax
ggauccgccaccauggacuggacauggauuuuguuucuuguggcggcugcaacgcgaguucauuccauguuuguuuuccugguucucuugccgcucgucucuagucaaugcgucaaucugacgacaagaacgcaacuucccccugccuacaccaauaguuuuacccguggcgucuauuauccagauaaaguguuucgaaguuccugccuucauuccacgcaagaucucuuccuuccauucuucucuaaugucaccugguuucaugcgauccacgugucuggaaccaacgggacuaaacgauucgacaaucccguccugccauuuaacgauggaguauacuucgcauccaccgagaaaucuggcauuauaagaggguggauauucgggacuacacucgacagcaagacacaaagucuccugauuguuaacaacgcgacaaacgucguaauuaaaguuugcgaauuucaauuuuguaaugacccguucuugggcguguauuaucacaagaauaacaaaaguuggauggaauccgaauuccggguuuauuccagcgcgaauaauugcacauuugaauacguuagccaaccuuuccugauggaucucgaaggcaaacaaggaaacuuuaagaaucuucgggaauucguuuucaagaacaucgacggguacuuuaagauauacucaaaacacaccccaauuaauuugguccgagaucugccgcaaggcuuuagugcgcuugagccccucguagaucucccaauugguauuaauaucacacgcuuucaaacccugcuggcauugcaucggagcuaucugacucccggcgauaguucuucaggguggacggcgggugccgcugcuuacuauguaggcuaucugcagccucguacauuucuccucaaauacaaugaaaauggcacuauuaccgacgccguugauugcgcucuggacccacugagcgagacuaaaugcacccucaaaucauucacuguugagaagggaauuuaccaaacaucaaacuucaggguccaaccuacggaaagcaucgugcgguuccccaacaucacuaaccucugccccuuuggagaaguauuuaacgcuacaagguucgcuuccgucuacgccuggaacaggaaaagaaucaguaauugcguggcugauuacuccgugcuguacaauuccgccucauuuucuacauuuaaguguuauggcguuaacgggacuaagcuuaacgaccucugcuucacaaacgucuaugccgacagcuuugucauucgcggggaugaaguaagacagauagcacccggucaaacuggcaaaauugcugauuacaauuacaaguugccagaugauuucacuggaugcguuauagcauggaacucuaacaaccuugacucaaagguugguggcaacuauaauuauuuguaucgccuguuucgcaaaucuaaucucaagccuuucgagcgcgacauaaauacgaccauauaccaagcgggguccaccccuuguaauggagucgagggguuuaauugcuauuuuccguugcaauccuacggguuccaaccaacaaacggcgucggcuaucaacccuaucggguugucguacucucauucgagcucaaccaugcaccagcaacaguuuguggccccaagaagagcacaaauuuggucaagaauaaaugcguuaauuuuaauuucaauggucugacuggcacagggguucuuaccgaaucaaauaagaaguuucugccauuucagcaguucggaagggacugugcagggaccacagaugccguuagagacccccaaacacucgaaauucuggacaucacgccaugcaguuucggugguguuagcgugauuacuccggguacuaauacguccaaccaaguggcuguguuguaucaagacguuaacuguaccgaaguuccuguagcaauccaugccggucaacugacccccacguggcgaguuuauagcaccgguuccaacgucuuucaaacaagagccggaugucucauaggcgcugaacaugugaauaauucauacgaaugugacauuccaaucggcgcagggauuugcgccucauaucagacacaaacuaacuccccgagaagacgucgcucaguggcgucacaaagcaucaucgcuuauacgaugagccucugcgccgagaacucugucgcauauucuaacaacucuauugcaauuccuacaaauuuuacaauuucuugcacuacugagauccugcccguaagcaugacgaaaacauccugcgacugcacaauguauaucuguggcgacucaacugagugcuccaaucuccucuugcaauacggaucuuucuguacucaacucaacagagcacuuacaggaauagccgucgaacaagacaagaacacacaagaggucuucgcccaaguaaagcaauguuacaaaaccccaccuauuaaagacuuugguggguuuaauuucucacagauucuuccagauccuucccguagaaggagaagcuuuauugaagaccucuuguuuaauaaagucacucuugcagacgcuggguuuauuaaacaauauggagacugcuugggagacauagcggcaagagaccugaucugcgcucaaaaguuuaaugggugcacuguguugccaccccuucugaccgacgagaugaucgcucaguauaccagugccuugcuggcagggaccauaacuagcggauggacuuucggugcaggagcugcucugcaaaucccuuuugcgaugcaaauggccuacagguuuaaugguauaggaguuacucagaauguccuguacgaaaaucaaaagcugaucgccaaucaauucaacagugcuauugggaaaauacaggacaguuugaguucaacagcgagcgcucucggcaaacugcaggauguugugaaucaaaacgcgcaagcuuugaacacucuugugaagcagcuuucauccaacuucggagcgaucucauccguccugaacgacauauugucaagacuugacccaccugaagcggaaguucagauagaccgacucauaacgggccgacuucaguccuugcagacauacgugacccaacaacuuauccgcgcagccgaaauaagggcuucagcuaaccuugcagcaaccaaaaugucagagugcgugcucggucaaagcaagcggguagacuuuuguggcaagggguaucaucuuauguccuuuccucaauccgccccucacgggguggucuucuugcacugcacuuauguaccugcucaagagaagaauuuuacgaccgccccugcgaucugucacgacgggaaagcacauuucccccgcgagggagucuuugugucuaaugguacucauugguuuguuacgcagcggaacuuuuacgaaccucaaauaauuacaacggauaauacagauguuagugggaauugcgacguggugaucgguauagucaacaauacgguguaugauccacuucaaccagaacuugauuccuuuaaggaagagcuggacaaauauuucaagaaccauacauccccugacguggaccuuggcgauauaagcggcauuaaugcuucaguggucaauauacaaaaggaaaucgaucgccugaaugaggucgcaaagaauuugaaugagucccugaucgaccugcaagagcucgggaaauaugagcaguacaucaaguggcccuggucagguagacguaggcggcgccggggcaguggcggcucagggagcgguuauauacccgaagccccuagagaugggcaagcuuauguccgaaaggacggcgaaugggugcuccuuuccacuuucuugggauaauag

SEQ ID NO: 139 - protein, 1274 aa, Artificial Sequence
  WuS_3F_2P_GlyDSol_pVax
MDWTWILFLVAAATRVHSMFVFLVLLPLVSSQCVNLTTRTQLPPAYTNSFTRGVYYPDKVFRSSCLHSTQDLFLPFFSNVTWFHAIHVSGTNGTKRFDNPVLPFNDGVYFASTEKSGIIRGWIFGTTLDSKTQSLLIVNNATNVVIKVCEFQFCNDPFLGVYYHKNNKSWMESEFRVYSSANNCTFEYVSQPFLMDLEGKQGNFKNLREFVFKNIDGYFKIYSKHTPINLVRDLPQGFSALEPLVDLPIGINITRFQTLLALHRSYLTPGDSSSGWTAGAAAYYVGYLQPRTFLLKYNENGTITDAVDCALDPLSETKCTLKSFTVEKGIYQTSNFRVQPTESIVRFPNITNLCPFGEVFNATRFASVYAWNRKRISNCVADYSVLYNSASFSTFKCYGVNGTKLNDLCFTNVYADSFVIRGDEVRQIAPGQTGKIADYNYKLPDDFTGCVIAWNSNNLDSKVGGNYNYLYRLFRKSNLKPFERDINTTIYQAGSTPCNGVEGFNCYFPLQSYGFQPTNGVGYQPYRVVVLSFELNHAPATVCGPKKSTNLVKNKCVNFNFNGLTGTGVLTESNKKFLPFQQFGRDCAGTTDAVRDPQTLEILDITPCSFGGVSVITPGTNTSNQVAVLYQDVNCTEVPVAIHAGQLTPTWRVYSTGSNVFQTRAGCLIGAEHVNNSYECDIPIGAGICASYQTQTNSPRRRRSVASQSIIAYTMSLCAENSVAYSNNSIAIPTNFTISCTTEILPVSMTKTSCDCTMYICGDSTECSNLLLQYGSFCTQLNRALTGIAVEQDKNTQEVFAQVKQCYKTPPIKDFGGFNFSQILPDPSRRRRSFIEDLLFNKVTLADAGFIKQYGDCLGDIAARDLICAQKFNGCTVLPPLLTDEMIAQYTSALLAGTITSGWTFGAGAALQIPFAMQMAYRFNGIGVTQNVLYENQKLIANQFNSAIGKIQDSLSSTASALGKLQDVVNQNAQALNTLVKQLSSNFGAISSVLNDILSRLDPPEAEVQIDRLITGRLQSLQTYVTQQLIRAAEIRASANLAATKMSECVLGQSKRVDFCGKGYHLMSFPQSAPHGVVFLHCTYVPAQEKNFTTAPAICHDGKAHFPREGVFVSNGTHWFVTQRNFYEPQIITTDNTDVSGNCDVVIGIVNNTVYDPLQPELDSFKEELDKYFKNHTSPDVDLGDISGINASVVNIQKEIDRLNEVAKNLNESLIDLQELGKYEQYIKWPWSGRRRRRRGSGGSGSGYIPEAPRDGQAYVRKDGEWVLLSTFLG

SEQ ID NO: 140 - DNA, 3840 bp, Artificial Sequence
  WuS_3F_2P_Gly_pVax
ggatccgccaccatggattggacctggatacttttcctcgtggccgcagcaacaagagtccactccatgttcgtcttcttggtacttttgccactcgtcagttctcagtgcgttaacctgactactagaacccaattgcccccggcatacacaaactctttcacccggggtgtctactatcccgacaaagtgtttagaagtagcgtgctgcacagcacccaagatctctttctgccattcttctcaaacgtcacctggtttcacgccatccatgtaagcgggaccaacggcacaaagcgttttgataaccctgttttgccattcaatgatggcgtgtattttgcttccactgagaaaagcaacatcattagagggtggatatttggcacaacgcttgactccaagacgcagagtcttttgatagtaaacaacgcaactaatgtggtcattaaagtctgtgaatttcaattttgcaatgaccccttccttggagtctattaccacaagaacaacaaaagctggatggaaagcgaatttagggtctacagctctgccaataactgcacattcgaatacgtcagccaaccattcttgatggacctggaaggcaagcaaggaaactttaagaatctgagggaatttgtgtttaagaatatcgacggatattttaagatctattccaagcatactcccattaatctcgttcgtgaccttcctcagggtttctctgcattggaacccctcgtagatttgcccattgggattaatatcactagattccagacgctgcttgcactccatcgatcttatctgacccctggtgactcctcttccgggtggacggcgggtgctgcagcctactacgttggctatttgcaacctaggacctttctgttgaagtataatgagaatgggactattactgatgccgttgattgcgccctcgatccgctgtcagaaacaaagtgcaccctgaagagcttcacagtagaaaagggaatctatcaaacctcaaatttccgcgttcaaccaactgaatcaatcgtgcgttttcctaacatcacaaatctgtgtccgtttggagaagtatttaatgcgacgcgtttcgcaagcgtctacgcgtggaatcgcaaacgtatctctaattgcgtagcagattattctgtgctgtacaatagcgcatctttctcaacgtttaagtgctacggcgttaatgggaccaagctgaatgatctctgtttcactaatgtgtacgcagacagttttgtaattagaggagacgaggttaggcaaatagcaccgggtcaaactggcaaaatcgccgactataactacaagctccctgatgacttcacgggctgcgtaattgcttggaactctaataacctggactctaaagtcggcgggaattataattatctctatcggttgtttcgaaaatccaatctcaaaccctttgagcgggacatcaatactacaatttatcaagctggtagtactccttgcaatggggtagaaggcttcaattgttatttcccccttcaatcttacggatttcaacccacgaacggcgtagggtaccagccctatcgagtggtggtactgtcattcgaacttaatcacgccccagcaacagtctgcgggcctaagaaaagcacgaatcttgtcaagaataagtgtgtaaatttcaacttcaatggtcttacaggcacgggagtgctcactgagtctaataagaaatttcttcctttccaacaattcggtcgtgatattgccgatactactgatgcagtccgagatccacaaactctcgaaatcctcgatattactccttgtagttttggcggcgtctccgtgatcaccccagggaccaacactagtaaccaagtggcggtgctctaccaagatgttaactgcacagaagtcccggtagcgatccatgccgaccagctcactcccacatggcgtgtttacagcacagggtcaaacgttttccagacccgtgccggatgtcttataggagccgaacacgtaaataacagttatgaatgcgatatcccaattggtgcaggtatctgtgcgtcatatcaaacccaaactaattctccgagacgacgacggagcgttgcctcacaatcaataatcgcctacacaatgtccctcggtgccgaaaattcagtcgcttactctaacaatagcattgctatccctaccaacttcactatttctgttaccacggaaattttgcctgtatccatgaccaaaacatctgttgattgcacgatgtacatctgcggggattctaccgaatgttctaacctgcttctgcaatacggctccttctgcacccaattgaaccgcgcactgactgggattgctgtggaacaagacaagaatactcaagaagtatttgcccaggtcaaacagatttacaaaactcccccaattaaagatttcggcggtttcaattttagtcaaattctgccagatccaagtcgacgccgcaggagctttattgaggacctgctctttaataaagtcacgctggccgacgccggcttcataaaacagtatggcgattgtcttggagacatcgccgcccgcgacctcatttgcgcacaaaagttcaatgggctcaccgtgttgccaccactgctcacagatgagatgatcgcacagtacacgagcgcccttcttgccggcactatcacgtctggttggacgttcggtgccggagccgctctgcaaattccctttgcaatgcaaatggcctatagatttaatggaattggcgtaacacagaacgtgttgtacgagaaccagaagctcattgccaaccagttcaattccgctattggcaaaatacaagactctctcagctcaactgctagcgcactgggaaaattgcaagacgtagtcaatcaaaatgcccaagccctcaatactctcgtcaaacagttgtcttccaactttggggctatcagtagtgtactcaatgacattctttcaagactggacccgcccgaggcggaagtccaaattgatcgtctgataactggaaggttgcaaagccttcagacctacgttacgcaacaacttattagggctgccgaaataagggcatccgctaatctggcagctacaaagatgtctgaatgtgttttgggacagagcaaacgggttgacttctgcggtaaaggttaccatctcatgtcttttccacaaagcgcaccgcacggagtcgtcttcctgcatgtaacatacgtcccagcccaagaaaagaattttaccacagccccagccatctgccacgacggcaaggcgcatttcccaagggaaggcgtgtttgtatccaacgggacgcattggtttgtcactcaaaggaacttttacgaaccccaaattattaccactgataacaccttcgtttctgggaactgtgatgtcgtgattgggatagtaaacaacacggtatatgatccactgcaaccagaactggattccttcaaagaagagctggacaaatacttcaagaatcatactagtcctgacgtcgacctgggcgatatcagtggaatcaacgctagcgtcgtaaacattcaaaaggagatcgatagacttaacgaggtcgccaagaatctcaatgaaagcctcatcgatttgcaagaactcggaaaatatgagcaatacataaaatggccatggtctggcaggagaagacgcaggagaggtagcggcggcagcggatcagggtacattccggaagcccccagggacggacaggcatatgtccgcaaggacggagaatgggttcttcttagcacttttctggggtaataa

SEQ ID NO: 141 - RNA, 3840 nt, Artificial Sequence
  WuS_3F_2P_Gly_pVax
ggauccgccaccauggauuggaccuggauacuuuuccucguggccgcagcaacaagaguccacuccauguucgucuucuugguacuuuugccacucgucaguucucagugcguuaaccugacuacuagaacccaauugcccccggcauacacaaacucuuucacccggggugucuacuaucccgacaaaguguuuagaaguagcgugcugcacagcacccaagaucucuuucugccauucuucucaaacgucaccugguuucacgccauccauguaagcgggaccaacggcacaaagcguuuugauaacccuguuuugccauucaaugauggcguguauuuugcuuccacugagaaaagcaacaucauuagaggguggauauuuggcacaacgcuugacuccaagacgcagagucuuuugauaguaaacaacgcaacuaauguggucauuaaagucugugaauuucaauuuugcaaugaccccuuccuuggagucuauuaccacaagaacaacaaaagcuggauggaaagcgaauuuagggucuacagcucugccaauaacugcacauucgaauacgucagccaaccauucuugauggaccuggaaggcaagcaaggaaacuuuaagaaucugagggaauuuguguuuaagaauaucgacggauauuuuaagaucuauuccaagcauacucccauuaaucucguucgugaccuuccucaggguuucucugcauuggaaccccucguagauuugcccauugggauuaauaucacuagauuccagacgcugcuugcacuccaucgaucuuaucugaccccuggugacuccucuuccggguggacggcgggugcugcagccuacuacguuggcuauuugcaaccuaggaccuuucuguugaaguauaaugagaaugggacuauuacugaugccguugauugcgcccucgauccgcugucagaaacaaagugcacccugaagagcuucacaguagaaaagggaaucuaucaaaccucaaauuuccgcguucaaccaacugaaucaaucgugcguuuuccuaacaucacaaaucuguguccguuuggagaaguauuuaaugcgacgcguuucgcaagcgucuacgcguggaaucgcaaacguaucucuaauugcguagcagauuauucugugcuguacaauagcgcaucuuucucaacguuuaagugcuacggcguuaaugggaccaagcugaaugaucucuguuucacuaauguguacgcagacaguuuuguaauuagaggagacgagguuaggcaaauagcaccgggucaaacuggcaaaaucgccgacuauaacuacaagcucccugaugacuucacgggcugcguaauugcuuggaacucuaauaaccuggacucuaaagucggcgggaauuauaauuaucucuaucgguuguuucgaaaauccaaucucaaacccuuugagcgggacaucaauacuacaauuuaucaagcugguaguacuccuugcaaugggguagaaggcuucaauuguuauuucccccuucaaucuuacggauuucaacccacgaacggcguaggguaccagcccuaucgaguggugguacugucauucgaacuuaaucacgccccagcaacagucugcgggccuaagaaaagcacgaaucuugucaagaauaaguguguaaauuucaacuucaauggucuuacaggcacgggagugcucacugagucuaauaagaaauuucuuccuuuccaacaauucggucgugauauugccgauacuacugaugcaguccgagauccacaaacucucgaaauccucgauauuacuccuuguaguuuuggcggcgucuccgugaucaccccagggaccaacacuaguaaccaaguggcggugcucuaccaagauguuaacugcacagaagucccgguagcgauccaugccgaccagcucacucccacauggcguguuuacagcacagggucaaacguuuuccagacccgugccggaugucuuauaggagccgaacacguaaauaacaguuaugaaugcgauaucccaauuggugcagguaucugugcgucauaucaaacccaaacuaauucuccgagacgacgacggagcguugccucacaaucaauaaucgccuacacaaugucccucggugccgaaaauucagucgcuuacucuaacaauagcauugcuaucccuaccaacuucacuauuucuguuaccacggaaauuuugccuguauccaugaccaaaacaucuguugauugcacgauguacaucugcggggauucuaccgaauguucuaaccugcuucugcaauacggcuccuucugcacccaauugaaccgcgcacugacugggauugcuguggaacaagacaagaauacucaagaaguauuugcccaggucaaacagauuuacaaaacucccccaauuaaagauuucggcgguuucaauuuuagucaaauucugccagauccaagucgacgccgcaggagcuuuauugaggaccugcucuuuaauaaagucacgcuggccgacgccggcuucauaaaacaguauggcgauugucuuggagacaucgccgcccgcgaccucauuugcgcacaaaaguucaaugggcucaccguguugccaccacugcucacagaugagaugaucgcacaguacacgagcgcccuucuugccggcacuaucacgucugguuggacguucggugccggagccgcucugcaaauucccuuugcaaugcaaauggccuauagauuuaauggaauuggcguaacacagaacguguuguacgagaaccagaagcucauugccaaccaguucaauuccgcuauuggcaaaauacaagacucucucagcucaacugcuagcgcacugggaaaauugcaagacguagucaaucaaaaugcccaagcccucaauacucucgucaaacaguugucuuccaacuuuggggcuaucaguaguguacucaaugacauucuuucaagacuggacccgcccgaggcggaaguccaaauugaucgucugauaacuggaagguugcaaagccuucagaccuacguuacgcaacaacuuauuagggcugccgaaauaagggcauccgcuaaucuggcagcuacaaagaugucugaauguguuuugggacagagcaaacggguugacuucugcgguaaagguuaccaucucaugucuuuuccacaaagcgcaccgcacggagucgucuuccugcauguaacauacgucccagcccaagaaaagaauuuuaccacagccccagccaucugccacgacggcaaggcgcauuucccaagggaaggcguguuuguauccaacgggacgcauugguuugucacucaaaggaacuuuuacgaaccccaaauuauuaccacugauaacaccuucguuucugggaacugugaugucgugauugggauaguaaacaacacgguauaugauccacugcaaccagaacuggauuccuucaaagaagagcuggacaaauacuucaagaaucauacuaguccugacgucgaccugggcgauaucaguggaaucaacgcuagcgucguaaacauucaaaaggagaucgauagacuuaacgaggucgccaagaaucucaaugaaagccucaucgauuugcaagaacucggaaaauaugagcaauacauaaaauggccauggucuggcaggagaagacgcaggagagguagcggcggcagcggaucaggguacauuccggaagcccccagggacggacaggcauauguccgcaaggacggagaauggguucuucuuagcacuuuucugggguaauaa

SEQ ID NO: 142 - protein, 1274 aa, Artificial Sequence
  WuS_3F_2P_Gly_pVax
MDWTWILFLVAAATRVHSMFVFLVLLPLVSSQCVNLTTRTQLPPAYTNSFTRGVYYPDKVFRSSVLHSTQDLFLPFFSNVTWFHAIHVSGTNGTKRFDNPVLPFNDGVYFASTEKSNIIRGWIFGTTLDSKTQSLLIVNNATNVVIKVCEFQFCNDPFLGVYYHKNNKSWMESEFRVYSSANNCTFEYVSQPFLMDLEGKQGNFKNLREFVFKNIDGYFKIYSKHTPINLVRDLPQGFSALEPLVDLPIGINITRFQTLLALHRSYLTPGDSSSGWTAGAAAYYVGYLQPRTFLLKYNENGTITDAVDCALDPLSETKCTLKSFTVEKGIYQTSNFRVQPTESIVRFPNITNLCPFGEVFNATRFASVYAWNRKRISNCVADYSVLYNSASFSTFKCYGVNGTKLNDLCFTNVYADSFVIRGDEVRQIAPGQTGKIADYNYKLPDDFTGCVIAWNSNNLDSKVGGNYNYLYRLFRKSNLKPFERDINTTIYQAGSTPCNGVEGFNCYFPLQSYGFQPTNGVGYQPYRVVVLSFELNHAPATVCGPKKSTNLVKNKCVNFNFNGLTGTGVLTESNKKFLPFQQFGRDIADTTDAVRDPQTLEILDITPCSFGGVSVITPGTNTSNQVAVLYQDVNCTEVPVAIHADQLTPTWRVYSTGSNVFQTRAGCLIGAEHVNNSYECDIPIGAGICASYQTQTNSPRRRRSVASQSIIAYTMSLGAENSVAYSNNSIAIPTNFTISVTTEILPVSMTKTSVDCTMYICGDSTECSNLLLQYGSFCTQLNRALTGIAVEQDKNTQEVFAQVKQIYKTPPIKDFGGFNFSQILPDPSRRRRSFIEDLLFNKVTLADAGFIKQYGDCLGDIAARDLICAQKFNGLTVLPPLLTDEMIAQYTSALLAGTITSGWTFGAGAALQIPFAMQMAYRFNGIGVTQNVLYENQKLIANQFNSAIGKIQDSLSSTASALGKLQDVVNQNAQALNTLVKQLSSNFGAISSVLNDILSRLDPPEAEVQIDRLITGRLQSLQTYVTQQLIRAAEIRASANLAATKMSECVLGQSKRVDFCGKGYHLMSFPQSAPHGVVFLHVTYVPAQEKNFTTAPAICHDGKAHFPREGVFVSNGTHWFVTQRNFYEPQIITTDNTFVSGNCDVVIGIVNNTVYDPLQPELDSFKEELDKYFKNHTSPDVDLGDISGINASVVNIQKEIDRLNEVAKNLNESLIDLQELGKYEQYIKWPWSGRRRRRRGSGGSGSGYIPEAPRDGQAYVRKDGEWVLLSTFLG

SEQ ID NO: 143 - DNA, 3822 bp, Artificial Sequence
  WuS_3F_2P_NoClev_pVax
ggatccgccaccatggattggacgtggattctgtttctggtggccgcagcgacaagggtgcattcaatgtttgtgttcctggtcctgctgccactggtctcatcacagtgtgtaaacctgactacaagaacgcagcttccgcctgcctacacgaacagcttcaccaggggagtgtattatcctgacaaagtctttaggagctctgttctccactccactcaagacctgtttctgcccttcttcagtaacgtgacttggtttcacgcaatacatgtctccggcacaaatggaaccaaaagattcgataaccctgttctcccattcaatgatggagtatattttgctagcactgaaaagtctaacattattagaggctggatatttggcacgacattggactccaagacgcaaagtctcttgattgtgaacaacgcaacaaacgtggtgataaaagtttgcgaattccaattttgcaatgacccattcctgggagtttactaccacaagaataacaaaagctggatggaatccgagttccgggtttactcctctgctaacaactgtacctttgagtatgtgagtcaaccattccttatggatctcgaaggaaaacaaggtaacttcaagaacctgagggagtttgtgtttaagaatatcgatggctattttaagatttatagcaaacacactccgattaatctggtgagagatctcccgcaaggattttctgctttggagccattggttgacttgcctattggaatcaacatcacccgttttcaaactctgcttgcgctgcatagatcctaccttacgcctggcgattcaagcagtggctggaccgcgggagcggccgcctattatgtaggctacttgcagcctcgcacctttctcctcaagtacaatgaaaacggcacaattacagacgcagtggattgtgctctggaccccctcagtgaaactaaatgtaccctgaaaagcttcactgttgagaaaggcatatatcaaacctcaaactttagagtgcaacctactgaaagcattgtaagattccctaacattacaaacctgtgcccctttggcgaagtctttaatgcaacccggtttgctagcgtgtatgcttggaaccgcaagaggatatccaattgcgtcgcagattattccgtcctgtataactctgccagctttagtaccttcaaatgttatggggtatctcccacaaaactcaatgatctttgtttcacaaatgtctatgctgactcctttgttatcagaggggacgaagttcgccaaattgctccaggtcaaacaggaaagattgcagattataactacaagcttcccgacgattttacaggttgtgtgatagcttggaactccaataatctggattccaaggtaggcgggaactacaattatctctacaggctcttccggaaatccaatctcaagccgttcgaaagggatataagcactgagatctatcaagcaggcagtacaccctgtaacggagtagagggcttcaactgctactttccactgcaatcctatgggtttcaaccgactaacggtgtcgggtaccaaccctatcgtgtcgtggtcctgtcctttgagcttctgcacgctcctgctaccgtttgcggccccaagaaaagcacgaatttggtcaagaacaaatgtgtcaactttaacttcaacggattgacagggaccggagtattgaccgaatctaataagaaatttctgcccttccaacaattcggacgggacatagcagacacaaccgatgctgtcagggacccacagacacttgaaatactcgatatcaccccatgcagctttggcggagtctcagtcattacgcctggcaccaatacttccaatcaagttgcagtgctctatcaggatgtcaattgtactgaggtccccgtcgccatccacgcggatcaacttacccccacatggcgagtatatagtaccgggagcaacgtctttcaaacccgagcaggatgtctgataggtgccgaacacgtaaacaacagctacgaatgtgatatcccgatcggcgcagggatttgcgctagctaccaaacccaaactaattctccgcgccgccgcaggtccgtagcaagtcaatcaataatagcatacaccatgtcattgggagctgaaaacagcgtggcatatagcaacaattccatagctatccctacaaatttcacgatttctgttaccaccgaaattctgccagtgagcatgaccaaaacctcagtggattgtacgatgtacatatgcggcgattccacggaatgttccaatctccttttgcaatacggcagcttttgtacccaactgaatagagctctgacgggtatagcagtagagcaggataagaacactcaagaggtgtttgcccaggtcaaacaaatttacaagactcccccaataaaagactttggcggcttcaatttcagccaaatcttgccagacccttccaggcggcggcgctcatttatcgaagatttgcttttcaataaagtcaccctggccgacgccggatttattaaacaatacggcgattgtctgggcgacatcgccgcaagggacctcatctgtgcgcaaaagttcaatggcctgacggtgcttccaccactcctgactgatgagatgattgcccaatacacatctgccctgctggctggtacaataacgagtgggtggacctttggggctggagcagcattgcaaattccattcgccatgcaaatggcatatcgttttaacggcattggagtgactcaaaatgtgctgtatgaaaaccaaaagcttattgcaaatcagtttaattccgccattggcaaaatccaggatagcctcagtagtacagcaagcgccttggggaaactgcaagatgtggttaatcaaaatgcacaagctctcaataccctggtcaagcaacttagtagtaactttggtgccatcagcagcgttctcaacgacatcctgagtcgtcttgatcccccagaggcagaggttcaaattgaccggcttatcactggaaggcttcaatccctgcaaacttacgtgactcagcaactgatacgcgctgcagaaattcgggcctcagcaaaccttgccgcgacaaagatgagcgaatgcgtgctgggacaatccaagcgggtcgacttttgtggtaaaggctatcatctgatgagcttcccacagtccgctccacacggcgtcgttttcctgcacgtgacctatgtgccagcacaggagaagaactttacaacagccccggctatctgccacgatggcaaagctcactttcctagagagggagtgtttgtaagcaatggaacccattggttcgttacacaaagaaacttttatgagccgcaaattatcacaacagataatacattcgtctccgggaactgtgacgttgtgatagggattgtcaacaacacagtgtacgaccccctgcaacccgagctggattcatttaaagaagaactcgacaagtacttcaagaatcatactagtccagatgtggatctgggcgatatatcaggaatcaatgccagcgtggtcaatattcaaaaggagattgatagactgaacgaggttgccaagaatctgaatgaaagcctgatcgatctgcaagaattgggcaagtatgagcagtacattaaatggccctggtctggcgggagcggcggatctgggtctggatatattcccgaagctcctagagatggacaagcttacgtccgtaaagacggcgagtgggttcttctctccacattcctcggctgatga

SEQ ID NO: 144 - RNA, 3822 nt, Artificial Sequence
  WuS_3F_2P_NoClev_pVax
ggauccgccaccauggauuggacguggauucuguuucugguggccgcagcgacaagggugcauucaauguuuguguuccugguccugcugccacuggucucaucacaguguguaaaccugacuacaagaacgcagcuuccgccugccuacacgaacagcuucaccaggggaguguauuauccugacaaagucuuuaggagcucuguucuccacuccacucaagaccuguuucugcccuucuucaguaacgugacuugguuucacgcaauacaugucuccggcacaaauggaaccaaaagauucgauaacccuguucucccauucaaugauggaguauauuuugcuagcacugaaaagucuaacauuauuagaggcuggauauuuggcacgacauuggacuccaagacgcaaagucucuugauugugaacaacgcaacaaacguggugauaaaaguuugcgaauuccaauuuugcaaugacccauuccugggaguuuacuaccacaagaauaacaaaagcuggauggaauccgaguuccggguuuacuccucugcuaacaacuguaccuuugaguaugugagucaaccauuccuuauggaucucgaaggaaaacaagguaacuucaagaaccugagggaguuuguguuuaagaauaucgauggcuauuuuaagauuuauagcaaacacacuccgauuaaucuggugagagaucucccgcaaggauuuucugcuuuggagccauugguugacuugccuauuggaaucaacaucacccguuuucaaacucugcuugcgcugcauagauccuaccuuacgccuggcgauucaagcaguggcuggaccgcgggagcggccgccuauuauguaggcuacuugcagccucgcaccuuucuccucaaguacaaugaaaacggcacaauuacagacgcaguggauugugcucuggacccccucagugaaacuaaauguacccugaaaagcuucacuguugagaaaggcauauaucaaaccucaaacuuuagagugcaaccuacugaaagcauuguaagauucccuaacauuacaaaccugugccccuuuggcgaagucuuuaaugcaacccgguuugcuagcguguaugcuuggaaccgcaagaggauauccaauugcgucgcagauuauuccguccuguauaacucugccagcuuuaguaccuucaaauguuaugggguaucucccacaaaacucaaugaucuuuguuucacaaaugucuaugcugacuccuuuguuaucagaggggacgaaguucgccaaauugcuccaggucaaacaggaaagauugcagauuauaacuacaagcuucccgacgauuuuacagguugugugauagcuuggaacuccaauaaucuggauuccaagguaggcgggaacuacaauuaucucuacaggcucuuccggaaauccaaucucaagccguucgaaagggauauaagcacugagaucuaucaagcaggcaguacacccuguaacggaguagagggcuucaacugcuacuuuccacugcaauccuauggguuucaaccgacuaacggugucggguaccaacccuaucgugucgugguccuguccuuugagcuucugcacgcuccugcuaccguuugcggccccaagaaaagcacgaauuuggucaagaacaaaugugucaacuuuaacuucaacggauugacagggaccggaguauugaccgaaucuaauaagaaauuucugcccuuccaacaauucggacgggacauagcagacacaaccgaugcugucagggacccacagacacuugaaauacucgauaucaccccaugcagcuuuggcggagucucagucauuacgccuggcaccaauacuuccaaucaaguugcagugcucuaucaggaugucaauuguacugagguccccgucgccauccacgcggaucaacuuacccccacauggcgaguauauaguaccgggagcaacgucuuucaaacccgagcaggaugucugauaggugccgaacacguaaacaacagcuacgaaugugauaucccgaucggcgcagggauuugcgcuagcuaccaaacccaaacuaauucuccgcgccgccgcagguccguagcaagucaaucaauaauagcauacaccaugucauugggagcugaaaacagcguggcauauagcaacaauuccauagcuaucccuacaaauuucacgauuucuguuaccaccgaaauucugccagugagcaugaccaaaaccucaguggauuguacgauguacauaugcggcgauuccacggaauguuccaaucuccuuuugcaauacggcagcuuuuguacccaacugaauagagcucugacggguauagcaguagagcaggauaagaacacucaagagguguuugcccaggucaaacaaauuuacaagacucccccaauaaaagacuuuggcggcuucaauuucagccaaaucuugccagacccuuccaggcggcggcgcucauuuaucgaagauuugcuuuucaauaaagucacccuggccgacgccggauuuauuaaacaauacggcgauugucugggcgacaucgccgcaagggaccucaucugugcgcaaaaguucaauggccugacggugcuuccaccacuccugacugaugagaugauugcccaauacacaucugcccugcuggcugguacaauaacgaguggguggaccuuuggggcuggagcagcauugcaaauuccauucgccaugcaaauggcauaucguuuuaacggcauuggagugacucaaaaugugcuguaugaaaaccaaaagcuuauugcaaaucaguuuaauuccgccauuggcaaaauccaggauagccucaguaguacagcaagcgccuuggggaaacugcaagaugugguuaaucaaaaugcacaagcucucaauacccuggucaagcaacuuaguaguaacuuuggugccaucagcagcguucucaacgacauccugagucgucuugaucccccagaggcagagguucaaauugaccggcuuaucacuggaaggcuucaaucccugcaaacuuacgugacucagcaacugauacgcgcugcagaaauucgggccucagcaaaccuugccgcgacaaagaugagcgaaugcgugcugggacaauccaagcgggucgacuuuugugguaaaggcuaucaucugaugagcuucccacaguccgcuccacacggcgucguuuuccugcacgugaccuaugugccagcacaggagaagaacuuuacaacagccccggcuaucugccacgauggcaaagcucacuuuccuagagagggaguguuuguaagcaauggaacccauugguucguuacacaaagaaacuuuuaugagccgcaaauuaucacaacagauaauacauucgucuccgggaacugugacguugugauagggauugucaacaacacaguguacgacccccugcaacccgagcuggauucauuuaaagaagaacucgacaaguacuucaagaaucauacuaguccagauguggaucugggcgauauaucaggaaucaaugccagcguggucaauauucaaaaggagauugauagacugaacgagguugccaagaaucugaaugaaagccugaucgaucugcaagaauugggcaaguaugagcaguacauuaaauggcccuggucuggcgggagcggcggaucugggucuggauauauucccgaagcuccuagagauggacaagcuuacguccguaaagacggcgaguggguucuucucuccacauuccucggcugauga

SEQ ID NO: 145 - protein, 1268 aa, Artificial Sequence
  WuS_3F_2P_NoClev_pVax
MDWTWILFLVAAATRVHSMFVFLVLLPLVSSQCVNLTTRTQLPPAYTNSFTRGVYYPDKVFRSSVLHSTQDLFLPFFSNVTWFHAIHVSGTNGTKRFDNPVLPFNDGVYFASTEKSNIIRGWIFGTTLDSKTQSLLIVNNATNVVIKVCEFQFCNDPFLGVYYHKNNKSWMESEFRVYSSANNCTFEYVSQPFLMDLEGKQGNFKNLREFVFKNIDGYFKIYSKHTPINLVRDLPQGFSALEPLVDLPIGINITRFQTLLALHRSYLTPGDSSSGWTAGAAAYYVGYLQPRTFLLKYNENGTITDAVDCALDPLSETKCTLKSFTVEKGIYQTSNFRVQPTESIVRFPNITNLCPFGEVFNATRFASVYAWNRKRISNCVADYSVLYNSASFSTFKCYGVSPTKLNDLCFTNVYADSFVIRGDEVRQIAPGQTGKIADYNYKLPDDFTGCVIAWNSNNLDSKVGGNYNYLYRLFRKSNLKPFERDISTEIYQAGSTPCNGVEGFNCYFPLQSYGFQPTNGVGYQPYRVVVLSFELLHAPATVCGPKKSTNLVKNKCVNFNFNGLTGTGVLTESNKKFLPFQQFGRDIADTTDAVRDPQTLEILDITPCSFGGVSVITPGTNTSNQVAVLYQDVNCTEVPVAIHADQLTPTWRVYSTGSNVFQTRAGCLIGAEHVNNSYECDIPIGAGICASYQTQTNSPRRRRSVASQSIIAYTMSLGAENSVAYSNNSIAIPTNFTISVTTEILPVSMTKTSVDCTMYICGDSTECSNLLLQYGSFCTQLNRALTGIAVEQDKNTQEVFAQVKQIYKTPPIKDFGGFNFSQILPDPSRRRRSFIEDLLFNKVTLADAGFIKQYGDCLGDIAARDLICAQKFNGLTVLPPLLTDEMIAQYTSALLAGTITSGWTFGAGAALQIPFAMQMAYRFNGIGVTQNVLYENQKLIANQFNSAIGKIQDSLSSTASALGKLQDVVNQNAQALNTLVKQLSSNFGAISSVLNDILSRLDPPEAEVQIDRLITGRLQSLQTYVTQQLIRAAEIRASANLAATKMSECVLGQSKRVDFCGKGYHLMSFPQSAPHGVVFLHVTYVPAQEKNFTTAPAICHDGKAHFPREGVFVSNGTHWFVTQRNFYEPQIITTDNTFVSGNCDVVIGIVNNTVYDPLQPELDSFKEELDKYFKNHTSPDVDLGDISGINASVVNIQKEIDRLNEVAKNLNESLIDLQELGKYEQYIKWPWSGGSGGSGSGYIPEAPRDGQAYVRKDGEWVLLSTFLG

SEQ ID NO: 146 - DNA, 3840 bp, Artificial Sequence
  WuS_3F_2P_pVax
ggatccgccaccatggattggacctggattctctttcttgtggcggcggcaacacgcgtccacagcatgttcgtctttctggtattgctgccgcttgtgagtagccagtgtgtgaacttgactaccaggacccagctcccaccggcttataccaattccttcacaagaggtgtctactatccagataaagttttccgcagctcagtgttgcatagcacacaggatctctttctgccattcttcagcaacgtcacgtggtttcatgcgatacacgttagtggaacaaacggaacaaaacgcttcgacaaccctgttctgccattcaatgacggagtttactttgcgagtaccgagaaatctaacatcattagagggtggatctttgggactacattggattctaaaacccagtcactcctcatagtcaataacgctacaaatgtggtgattaaggtatgcgaatttcagttttgcaacgacccatttctcggtgtatattatcacaagaataataaaagttggatggagtccgagttccgcgtctattcatcagccaataattgtactttcgaatatgtttctcaaccgtttctcatggatctcgaaggaaagcaagggaattttaagaatctccgggagtttgtcttcaagaacatagatggctattttaaaatttactcaaagcatactcctattaacctcgttcgggatctcccccagggttttagcgccctggagccactggttgatctgccaattgggattaatatcacacgctttcaaactctcctggcccttcacagatcttacttgaccccaggtgattcaagtagtggttggacagctggagctgctgcatattatgtaggttatctccaaccccgcacctttctcctcaaatataacgagaacggcaccattacagatgcggtggactgtgccttggaccctctttctgagaccaagtgcacactcaaaagcttcactgtcgaaaaggggatttaccagacatcaaattttagagttcaacccaccgaaagcattgtgagatttcctaacattacaaacttgtgcccatttggggaagtctttaacgctacacgctttgctagcgtctatgcttggaaccgaaaacggattagtaactgcgtagctgattattccgtcttgtacaacagcgcatcttttagcactttcaagtgttatggagtaagcccaacaaagctcaacgacctttgttttactaacgtctatgctgattcattcgtgattcgtggggatgaggttcgtcagatcgccccaggccaaaccgggaaaatcgctgattataattataaattgcctgacgattttaccggctgtgtaatcgcctggaattccaacaatcttgattccaaggttggcggcaactacaactatctctaccgtctgtttcgcaaatccaatctcaagcccttcgaacgcgatatttcaactgaaatctatcaggcagggtccactccgtgtaacggcgtagaaggatttaattgttacttcccattgcaaagttatggctttcaacccaccaacggagtcgggtaccaaccatacagagtcgtcgtgctctcatttgagctccttcatgcacctgccacggtgtgcggcccaaagaaatcaacgaaccttgtgaagaataaatgtgtcaattttaactttaatggcctgacagggactggcgtcctcacagaatctaataagaagtttctccctttccagcaatttggtcgcgatatagctgataccacagatgcagttagagacccacagacacttgagattctcgatattaccccgtgctcctttggcggcgtgtccgtcattactcccggtaccaatacgtctaaccaggtagcagtgctctaccaagatgtaaattgtactgaggtacccgtggcaatccatgccgaccaactgactccaacgtggcgggtttattcaaccggaagcaacgtgtttcaaacacgggctggctgccttataggcgctgagcacgtgaataatagttacgagtgtgatatcccgatcggagccggcatctgtgcatcttatcaaacacaaacaaactccccgcgccggcggagaagcgtggctagccaaagtataatcgcttatacaatgtccttgggcgcggaaaattcagtggcttattccaataattcaattgccattcctaccaactttacaattagcgtgaccacagaaatcttgcctgtgtctatgaccaagaccagcgtcgattgcaccatgtatatctgtggagatagcaccgagtgttcaaatttgctcctgcaatacggttccttttgtacacagcttaaccgcgccctcacaggtattgctgttgaacaagacaagaatactcaagaggtatttgctcaggtaaaacaaatttataagaccccaccgataaaagattttggcggtttcaatttctcccaaatattgccagatcctagtaggcgtcgtagatcatttatcgaggatctcctgttcaataaagtaaccctcgccgacgctggtttcatcaaacaatatggcgactgcctgggagatattgcagctagggatttgatttgtgcacagaagttcaatggactcaccgttctcccgcctctcctgacagatgagatgattgcacaatacacctctgctcttttggccgggaccattacgagcggttggacttttggcgcgggtgcggctctccaaattcctttcgcgatgcaaatggcgtatagatttaatggaattggcgttactcaaaacgtcttgtacgagaatcagaaactgatcgccaaccaatttaacagtgcaattggcaaaatccaagatagccttagttctactgcttcagcattgggtaagttgcaagatgtggtcaaccaaaacgcacaagcactcaataccctcgtgaagcaattgtccagcaattttggagctatctcaagtgtgctcaacgacatcctttctaggcttgatccacccgaggcagaggttcaaatcgacagactgataactggcaggctccaatctctgcaaacgtacgtgacacagcaactgattagggctgctgagatcagggcgtccgcgaatttggcagcaaccaaaatgagcgaatgcgtgctgggacaatcaaagagagttgatttctgtggaaagggttaccatctcatgtccttccctcaatcagctccccatggagttgtgtttctgcacgttacttacgtgccggcacaagaaaagaatttcaccactgcaccggctatatgtcatgatgggaaagcccacttcccgcgggaaggcgttttcgtgtccaacgggactcattggttcgtcacacaaaggaacttctatgagccacaaataattacaacagacaacacctttgtctctgggaactgcgatgtcgtgattggaatcgtgaacaacactgtctacgatccgctgcaacccgaactcgactcattcaaagaggaactggataagtatttcaagaaccataccagccccgatgtcgatctgggcgatatctccgggataaatgcttcagtagtaaacattcaaaaggaaatcgaccggctgaacgaggttgcgaagaatcttaatgagtcattgatcgacctgcaagaacttggtaagtatgagcagtacatcaagtggccttggtcaggccgcaggcgtcggcgtcgtgggagcggcggcagtgggagcggatatattccagaagcgccccgagacggacaagcttacgtacgaaaagacggagaatgggtactgctttccacttttcttggctaatga

SEQ ID NO: 147 - RNA, 3840 nt, Artificial Sequence
  WuS_3F_2P_pVax
ggauccgccaccauggauuggaccuggauucucuuucuuguggcggcggcaacacgcguccacagcauguucgucuuucugguauugcugccgcuugugaguagccagugugugaacuugacuaccaggacccagcucccaccggcuuauaccaauuccuucacaagaggugucuacuauccagauaaaguuuuccgcagcucaguguugcauagcacacaggaucucuuucugccauucuucagcaacgucacgugguuucaugcgauacacguuaguggaacaaacggaacaaaacgcuucgacaacccuguucugccauucaaugacggaguuuacuuugcgaguaccgagaaaucuaacaucauuagaggguggaucuuugggacuacauuggauucuaaaacccagucacuccucauagucaauaacgcuacaaauguggugauuaagguaugcgaauuucaguuuugcaacgacccauuucucgguguauauuaucacaagaauaauaaaaguuggauggaguccgaguuccgcgucuauucaucagccaauaauuguacuuucgaauauguuucucaaccguuucucauggaucucgaaggaaagcaagggaauuuuaagaaucuccgggaguuugucuucaagaacauagauggcuauuuuaaaauuuacucaaagcauacuccuauuaaccucguucgggaucucccccaggguuuuagcgcccuggagccacugguugaucugccaauugggauuaauaucacacgcuuucaaacucuccuggcccuucacagaucuuacuugaccccaggugauucaaguagugguuggacagcuggagcugcugcauauuauguagguuaucuccaaccccgcaccuuucuccucaaauauaacgagaacggcaccauuacagaugcgguggacugugccuuggacccucuuucugagaccaagugcacacucaaaagcuucacugucgaaaaggggauuuaccagacaucaaauuuuagaguucaacccaccgaaagcauugugagauuuccuaacauuacaaacuugugcccauuuggggaagucuuuaacgcuacacgcuuugcuagcgucuaugcuuggaaccgaaaacggauuaguaacugcguagcugauuauuccgucuuguacaacagcgcaucuuuuagcacuuucaaguguuauggaguaagcccaacaaagcucaacgaccuuuguuuuacuaacgucuaugcugauucauucgugauucguggggaugagguucgucagaucgccccaggccaaaccgggaaaaucgcugauuauaauuauaaauugccugacgauuuuaccggcuguguaaucgccuggaauuccaacaaucuugauuccaagguuggcggcaacuacaacuaucucuaccgucuguuucgcaaauccaaucucaagcccuucgaacgcgauauuucaacugaaaucuaucaggcaggguccacuccguguaacggcguagaaggauuuaauuguuacuucccauugcaaaguuauggcuuucaacccaccaacggagucggguaccaaccauacagagucgucgugcucucauuugagcuccuucaugcaccugccacggugugcggcccaaagaaaucaacgaaccuugugaagaauaaaugugucaauuuuaacuuuaauggccugacagggacuggcguccucacagaaucuaauaagaaguuucucccuuuccagcaauuuggucgcgauauagcugauaccacagaugcaguuagagacccacagacacuugagauucucgauauuaccccgugcuccuuuggcggcguguccgucauuacucccgguaccaauacgucuaaccagguagcagugcucuaccaagauguaaauuguacugagguacccguggcaauccaugccgaccaacugacuccaacguggcggguuuauucaaccggaagcaacguguuucaaacacgggcuggcugccuuauaggcgcugagcacgugaauaauaguuacgagugugauaucccgaucggagccggcaucugugcaucuuaucaaacacaaacaaacuccccgcgccggcggagaagcguggcuagccaaaguauaaucgcuuauacaauguccuugggcgcggaaaauucaguggcuuauuccaauaauucaauugccauuccuaccaacuuuacaauuagcgugaccacagaaaucuugccugugucuaugaccaagaccagcgucgauugcaccauguauaucuguggagauagcaccgaguguucaaauuugcuccugcaauacgguuccuuuuguacacagcuuaaccgcgcccucacagguauugcuguugaacaagacaagaauacucaagagguauuugcucagguaaaacaaauuuauaagaccccaccgauaaaagauuuuggcgguuucaauuucucccaaauauugccagauccuaguaggcgucguagaucauuuaucgaggaucuccuguucaauaaaguaacccucgccgacgcugguuucaucaaacaauauggcgacugccugggagauauugcagcuagggauuugauuugugcacagaaguucaauggacucaccguucucccgccucuccugacagaugagaugauugcacaauacaccucugcucuuuuggccgggaccauuacgagcgguuggacuuuuggcgcgggugcggcucuccaaauuccuuucgcgaugcaaauggcguauagauuuaauggaauuggcguuacucaaaacgucuuguacgagaaucagaaacugaucgccaaccaauuuaacagugcaauuggcaaaauccaagauagccuuaguucuacugcuucagcauuggguaaguugcaagauguggucaaccaaaacgcacaagcacucaauacccucgugaagcaauuguccagcaauuuuggagcuaucucaagugugcucaacgacauccuuucuaggcuugauccacccgaggcagagguucaaaucgacagacugauaacuggcaggcuccaaucucugcaaacguacgugacacagcaacugauuagggcugcugagaucagggcguccgcgaauuuggcagcaaccaaaaugagcgaaugcgugcugggacaaucaaagagaguugauuucuguggaaaggguuaccaucucauguccuucccucaaucagcuccccauggaguuguguuucugcacguuacuuacgugccggcacaagaaaagaauuucaccacugcaccggcuauaugucaugaugggaaagcccacuucccgcgggaaggcguuuucguguccaacgggacucauugguucgucacacaaaggaacuucuaugagccacaaauaauuacaacagacaacaccuuugucucugggaacugcgaugucgugauuggaaucgugaacaacacugucuacgauccgcugcaacccgaacucgacucauucaaagaggaacuggauaaguauuucaagaaccauaccagccccgaugucgaucugggcgauaucuccgggauaaaugcuucaguaguaaacauucaaaaggaaaucgaccggcugaacgagguugcgaagaaucuuaaugagucauugaucgaccugcaagaacuugguaaguaugagcaguacaucaaguggccuuggucaggccgcaggcgucggcgucgugggagcggcggcagugggagcggauauauuccagaagcgccccgagacggacaagcuuacguacgaaaagacggagaauggguacugcuuuccacuuuucuuggcuaauga

SEQ ID NO: 148 - protein, 1274 aa, Artificial Sequence
  WuS_3F_2P_pVax
MDWTWILFLVAAATRVHSMFVFLVLLPLVSSQCVNLTTRTQLPPAYTNSFTRGVYYPDKVFRSSVLHSTQDLFLPFFSNVTWFHAIHVSGTNGTKRFDNPVLPFNDGVYFASTEKSNIIRGWIFGTTLDSKTQSLLIVNNATNVVIKVCEFQFCNDPFLGVYYHKNNKSWMESEFRVYSSANNCTFEYVSQPFLMDLEGKQGNFKNLREFVFKNIDGYFKIYSKHTPINLVRDLPQGFSALEPLVDLPIGINITRFQTLLALHRSYLTPGDSSSGWTAGAAAYYVGYLQPRTFLLKYNENGTITDAVDCALDPLSETKCTLKSFTVEKGIYQTSNFRVQPTESIVRFPNITNLCPFGEVFNATRFASVYAWNRKRISNCVADYSVLYNSASFSTFKCYGVSPTKLNDLCFTNVYADSFVIRGDEVRQIAPGQTGKIADYNYKLPDDFTGCVIAWNSNNLDSKVGGNYNYLYRLFRKSNLKPFERDISTEIYQAGSTPCNGVEGFNCYFPLQSYGFQPTNGVGYQPYRVVVLSFELLHAPATVCGPKKSTNLVKNKCVNFNFNGLTGTGVLTESNKKFLPFQQFGRDIADTTDAVRDPQTLEILDITPCSFGGVSVITPGTNTSNQVAVLYQDVNCTEVPVAIHADQLTPTWRVYSTGSNVFQTRAGCLIGAEHVNNSYECDIPIGAGICASYQTQTNSPRRRRSVASQSIIAYTMSLGAENSVAYSNNSIAIPTNFTISVTTEILPVSMTKTSVDCTMYICGDSTECSNLLLQYGSFCTQLNRALTGIAVEQDKNTQEVFAQVKQIYKTPPIKDFGGFNFSQILPDPSRRRRSFIEDLLFNKVTLADAGFIKQYGDCLGDIAARDLICAQKFNGLTVLPPLLTDEMIAQYTSALLAGTITSGWTFGAGAALQIPFAMQMAYRFNGIGVTQNVLYENQKLIANQFNSAIGKIQDSLSSTASALGKLQDVVNQNAQALNTLVKQLSSNFGAISSVLNDILSRLDPPEAEVQIDRLITGRLQSLQTYVTQQLIRAAEIRASANLAATKMSECVLGQSKRVDFCGKGYHLMSFPQSAPHGVVFLHVTYVPAQEKNFTTAPAICHDGKAHFPREGVFVSNGTHWFVTQRNFYEPQIITTDNTFVSGNCDVVIGIVNNTVYDPLQPELDSFKEELDKYFKNHTSPDVDLGDISGINASVVNIQKEIDRLNEVAKNLNESLIDLQELGKYEQYIKWPWSGRRRRRRGSGGSGSGYIPEAPRDGQAYVRKDGEWVLLSTFLG

SEQ ID NO: 149 - DNA, 3840 bp, Artificial Sequence
  WuS_3F_D2P_GlyDSol_pVax
ggatccgccaccatggattggacctggatcttgtttctcgtcgcagctgccacaagagtccacagtatgtttgtatttctcgttctcctgcctcttgtgtcctctcagtgtgtgaatctgacgaccagaactcagctcccacccgcatacactaacagtatcacgaggggcgtttattacccagacaaggttttccgaagcagttgtctgtatagtacacaggatttgttcctgccattctttagtaacgtgacttggtttcatgcgatccacgtttctggcacaaacggtaccaaaagattcgataaccccgtgctgcctttcaatgacggcgtgtatttcgcttctactgaaaagtccggcatcatccggggatggatcttcggcactactttggatagcaaaacccaatccctgctgattgtgaataatgcaaccaacgtggtgatcaaagtctgtgagtttcaattctgtaatgacccatttctgggcgtttactaccacaagaacaacaaaagttggatggagtccgaatttcgcgtctactcatccgcgaacaattgcacatttgagtatgtgagtcaaccattcttgatggatcttgaagggaagcaaggcaatttcaagaacctgcgggagtttgtatttaagaacattgacggctatttcaagatatattctaaacatactcccattaacctcgtgcgcgacttgccccagggattcagtgctctggaaccactggtcgatctccccatcggcattaatattacacgctttcaaactctcctcgctttgcatcggtcctatcttactccgggagatagctcaagcggatggacggcaggcgcggcggcatattatgttggatatctccaaccacgcacgttccttctgaaatataatgaaaatggcactattactgatgcagtcgactgcgccctggaccctctgtctgagaccaagtgtaccctgaagtcattcaccgttgagaagggaatctaccaaacctctaactttagggtacaacctactgagagcattgtccgcttcccgaatatcaccaatctttgtccgtttggtgaggtgtttaacgcgacacgatttgcttccgtatacgcctggaatcgcaaacgcatcagcaactgtgtggctgattactcatttctctataattccgcttccttctctactttcaagtgttatggggtgaatgggactaaacttaatgacttgtgctttactaacgtgtatgctgatagcttcgtcattcgtggagatgaggtcaggcaaatagctcccggacaaacagggaagatagcggactataactacaaactgcctgatgatttcaccgggtgcgtcatcgcgtggaacagcaataacctcgatagcaaggttggcggaaactataattatctctatcgtttgtttaggaaaagcaatctcaagcccttcgagcgggatattaatacaacgatatatcaagctggctctaccccgtgcaacggagtagagggcttcaattgctactttcctttgcagtcctacggattccaacccaccaacggagtgggctaccaaccataccgtgtcgtggttttgagtttcgaactgaaccacgcaccagcaacagtctgcggaccgaagaagagtacaaaccttgtgaagaataagtgcgtgaactttaatttcaatggcctgactggaaccggagttctgacggaatccaataagaaatttctgccgtttcagcaatttggacgggattgtgctggaacgactgatgccgtacgtgatcctcaaacactggaaatcctggacataaccccttgttcctttggtggcgtaagcgttattactccaggcacaaacacatcaaatcaagtcgccgtactgtatcaaggtgtcaactgtactgaagtacctgtagccattcatgcaggacaactgacccctacatggcgagtgtattcaacgggaagcaacgtatttcaaaccagggccggctgtctcatcggagcagagcatgtcaataatagttatgaatgcgacatcccaataggtgctgggatctgcgcgagctaccaaacccaaactaatagcccacgaagacggagatctgtcgcgtcccaaagcattattgcgtacacgatgagcctctgtgcagaaaattcagttgcctacagcaacaatagcatcgctattccaaccaatttcactatcagctgtacaacagaaattctcccagtctccatgacgaagacatcctgcgattgtacaatgtatatatgcggcgactcaacagaatgttcaaatttgttgctgcaatacgggtccttctgcacccaactcaatcgagctcttacaggcatagcggtcgaacaagacaagaacacacaagaagtgtttgcccaagttaaacagtgttacaagacaccacctatcaaagatttcggcggttttaacttttctcagatcttgccagacccatctaggcggcggcgatcctttatcgaggaccttctcttcaataaggtaactcttgcagacgctggatttattaagcaatacggcgactgtctcggggatatcgccgctagggatctgatctgtgcccagaaatttaacggctgcacggtgctgccccctctgctgactgatgaaatgatagcacaatatacttctgcattgctggccggtaccattacatcaggatggacatttggtgccggggcggcgctccaaattcccttcgccatgcaaatggcctataggtttaacggcatcggggtgacccaaaacgtcctctatgagaatcaaaagctgattgctaaccagtttaactcagcaataggaaagattcaagactctctgtcaagtaccgcatccgcccttggaaagctccaagacgttgttaaccagaatgcacaagctctcaacacgctcgtgaaacaactctcttcaaattttggtgcgatctcttctggcccaaatgacattttgagccggcttcccaaggtagaagctgaagtacaaattgatcgcctgatcaccggacggctccaaagtctgcagacgtacgtcacccagcaactgatacgggcagcggagatccgggcttctgccaacctggccgccacgaagatgagcgaatgcgtgctcggacagtccaaaagagtagatttctgtggcaagggctatcatctcatgtcctttccccaatccgcccctcacggagttgtcttccttcattgcacttacgtccccgctcaagaaaagaattttactacggcacctgctatctgtcacgacgggaaagcccattttcctagagaaggtgtgtttgtatctaacggcacgcactggttcgtcacgcaacgtaacttttacgagccccagatcatcaccacagacaatacggatgtatcaggtaattgtgatgtcctgattggtatcgtcaataacactgtatacgatcctttgcaaccggaactggactcctttaaagaggaacttgataagtatttcaagaatcacacttccccagatgtcgatctcggggacatctcaggaattaatgcatcagtggtcaatattcaaaaggaaattgatcgcttgaatgaggttgcaaagaatttgaatgaaagccttatcgaccttcaagagctgggcaaatatgagcagtacattaaatggccttggagcggtcgccggcgccgaaggcggggttccggcggtagcggtagcggttatattccagaagctcctcgcgatgggcaggcttatgtgaggaaagatggtgaatgggtccttttgtccacgttcctcgggtagtaa

SEQ ID NO: 150 - RNA, 3840 nt, Artificial Sequence
  WuS_3F_D2P_GlyDSol_pVax
ggauccgccaccauggauuggaccuggaucuuguuucucgucgcagcugccacaagaguccacaguauguuuguauuucucguucuccugccucuuguguccucucagugugugaaucugacgaccagaacucagcucccacccgcauacacuaacaguaucacgaggggcguuuauuacccagacaagguuuuccgaagcaguugucuguauaguacacaggauuuguuccugccauucuuuaguaacgugacuugguuucaugcgauccacguuucuggcacaaacgguaccaaaagauucgauaaccccgugcugccuuucaaugacggcguguauuucgcuucuacugaaaaguccggcaucauccggggauggaucuucggcacuacuuuggauagcaaaacccaaucccugcugauugugaauaaugcaaccaacguggugaucaaagucugugaguuucaauucuguaaugacccauuucugggcguuuacuaccacaagaacaacaaaaguuggauggaguccgaauuucgcgucuacucauccgcgaacaauugcacauuugaguaugugagucaaccauucuugauggaucuugaagggaagcaaggcaauuucaagaaccugcgggaguuuguauuuaagaacauugacggcuauuucaagauauauucuaaacauacucccauuaaccucgugcgcgacuugccccagggauucagugcucuggaaccacuggucgaucuccccaucggcauuaauauuacacgcuuucaaacucuccucgcuuugcaucgguccuaucuuacuccgggagauagcucaagcggauggacggcaggcgcggcggcauauuauguuggauaucuccaaccacgcacguuccuucugaaauauaaugaaaauggcacuauuacugaugcagucgacugcgcccuggacccucugucugagaccaaguguacccugaagucauucaccguugagaagggaaucuaccaaaccucuaacuuuaggguacaaccuacugagagcauuguccgcuucccgaauaucaccaaucuuuguccguuuggugagguguuuaacgcgacacgauuugcuuccguauacgccuggaaucgcaaacgcaucagcaacuguguggcugauuacucauuucucuauaauuccgcuuccuucucuacuuucaaguguuauggggugaaugggacuaaacuuaaugacuugugcuuuacuaacguguaugcugauagcuucgucauucguggagaugaggucaggcaaauagcucccggacaaacagggaagauagcggacuauaacuacaaacugccugaugauuucaccgggugcgucaucgcguggaacagcaauaaccucgauagcaagguuggcggaaacuauaauuaucucuaucguuuguuuaggaaaagcaaucucaagcccuucgagcgggauauuaauacaacgauauaucaagcuggcucuaccccgugcaacggaguagagggcuucaauugcuacuuuccuuugcaguccuacggauuccaacccaccaacggagugggcuaccaaccauaccgugucgugguuuugaguuucgaacugaaccacgcaccagcaacagucugcggaccgaagaagaguacaaaccuugugaagaauaagugcgugaacuuuaauuucaauggccugacuggaaccggaguucugacggaauccaauaagaaauuucugccguuucagcaauuuggacgggauugugcuggaacgacugaugccguacgugauccucaaacacuggaaauccuggacauaaccccuuguuccuuugguggcguaagcguuauuacuccaggcacaaacacaucaaaucaagucgccguacuguaucaaggugucaacuguacugaaguaccuguagccauucaugcaggacaacugaccccuacauggcgaguguauucaacgggaagcaacguauuucaaaccagggccggcugucucaucggagcagagcaugucaauaauaguuaugaaugcgacaucccaauaggugcugggaucugcgcgagcuaccaaacccaaacuaauagcccacgaagacggagaucugucgcgucccaaagcauuauugcguacacgaugagccucugugcagaaaauucaguugccuacagcaacaauagcaucgcuauuccaaccaauuucacuaucagcuguacaacagaaauucucccagucuccaugacgaagacauccugcgauuguacaauguauauaugcggcgacucaacagaauguucaaauuuguugcugcaauacggguccuucugcacccaacucaaucgagcucuuacaggcauagcggucgaacaagacaagaacacacaagaaguguuugcccaaguuaaacaguguuacaagacaccaccuaucaaagauuucggcgguuuuaacuuuucucagaucuugccagacccaucuaggcggcggcgauccuuuaucgaggaccuucucuucaauaagguaacucuugcagacgcuggauuuauuaagcaauacggcgacugucucggggauaucgccgcuagggaucugaucugugcccagaaauuuaacggcugcacggugcugcccccucugcugacugaugaaaugauagcacaauauacuucugcauugcuggccgguaccauuacaucaggauggacauuuggugccggggcggcgcuccaaauucccuucgccaugcaaauggccuauagguuuaacggcaucggggugacccaaaacguccucuaugagaaucaaaagcugauugcuaaccaguuuaacucagcaauaggaaagauucaagacucucugucaaguaccgcauccgcccuuggaaagcuccaagacguuguuaaccagaaugcacaagcucucaacacgcucgugaaacaacucucuucaaauuuuggugcgaucucuucuggcccaaaugacauuuugagccggcuucccaagguagaagcugaaguacaaauugaucgccugaucaccggacggcuccaaagucugcagacguacgucacccagcaacugauacgggcagcggagauccgggcuucugccaaccuggccgccacgaagaugagcgaaugcgugcucggacaguccaaaagaguagauuucuguggcaagggcuaucaucucauguccuuuccccaauccgccccucacggaguugucuuccuucauugcacuuacguccccgcucaagaaaagaauuuuacuacggcaccugcuaucugucacgacgggaaagcccauuuuccuagagaagguguguuuguaucuaacggcacgcacugguucgucacgcaacguaacuuuuacgagccccagaucaucaccacagacaauacggauguaucagguaauugugauguccugauugguaucgucaauaacacuguauacgauccuuugcaaccggaacuggacuccuuuaaagaggaacuugauaaguauuucaagaaucacacuuccccagaugucgaucucggggacaucucaggaauuaaugcaucaguggucaauauucaaaaggaaauugaucgcuugaaugagguugcaaagaauuugaaugaaagccuuaucgaccuucaagagcugggcaaauaugagcaguacauuaaauggccuuggagcggucgccggcgccgaaggcgggguuccggcgguagcgguagcgguuauauuccagaagcuccucgcgaugggcaggcuuaugugaggaaagauggugaauggguccuuuuguccacguuccucggguaguaa

SEQ ID NO: 151 - protein, 1274 aa, Artificial Sequence
  WuS_3F_D2P_GlyDSol_pVax
MDWTWILFLVAAATRVHSMFVFLVLLPLVSSQCVNLTTRTQLPPAYTNSITRGVYYPDKVFRSSCLYSTQDLFLPFFSNVTWFHAIHVSGTNGTKRFDNPVLPFNDGVYFASTEKSGIIRGWIFGTTLDSKTQSLLIVNNATNVVIKVCEFQFCNDPFLGVYYHKNNKSWMESEFRVYSSANNCTFEYVSQPFLMDLEGKQGNFKNLREFVFKNIDGYFKIYSKHTPINLVRDLPQGFSALEPLVDLPIGINITRFQTLLALHRSYLTPGDSSSGWTAGAAAYYVGYLQPRTFLLKYNENGTITDAVDCALDPLSETKCTLKSFTVEKGIYQTSNFRVQPTESIVRFPNITNLCPFGEVFNATRFASVYAWNRKRISNCVADYSFLYNSASFSTFKCYGVNGTKLNDLCFTNVYADSFVIRGDEVRQIAPGQTGKIADYNYKLPDDFTGCVIAWNSNNLDSKVGGNYNYLYRLFRKSNLKPFERDINTTIYQAGSTPCNGVEGFNCYFPLQSYGFQPTNGVGYQPYRVVVLSFELNHAPATVCGPKKSTNLVKNKCVNFNFNGLTGTGVLTESNKKFLPFQQFGRDCAGTTDAVRDPQTLEILDITPCSFGGVSVITPGTNTSNQVAVLYQGVNCTEVPVAIHAGQLTPTWRVYSTGSNVFQTRAGCLIGAEHVNNSYECDIPIGAGICASYQTQTNSPRRRRSVASQSIIAYTMSLCAENSVAYSNNSIAIPTNFTISCTTEILPVSMTKTSCDCTMYICGDSTECSNLLLQYGSFCTQLNRALTGIAVEQDKNTQEVFAQVKQCYKTPPIKDFGGFNFSQILPDPSRRRRSFIEDLLFNKVTLADAGFIKQYGDCLGDIAARDLICAQKFNGCTVLPPLLTDEMIAQYTSALLAGTITSGWTFGAGAALQIPFAMQMAYRFNGIGVTQNVLYENQKLIANQFNSAIGKIQDSLSSTASALGKLQDVVNQNAQALNTLVKQLSSNFGAISSGPNDILSRLPKVEAEVQIDRLITGRLQSLQTYVTQQLIRAAEIRASANLAATKMSECVLGQSKRVDFCGKGYHLMSFPQSAPHGVVFLHCTYVPAQEKNFTTAPAICHDGKAHFPREGVFVSNGTHWFVTQRNFYEPQIITTDNTDVSGNCDVLIGIVNNTVYDPLQPELDSFKEELDKYFKNHTSPDVDLGDISGINASVVNIQKEIDRLNEVAKNLNESLIDLQELGKYEQYIKWPWSGRRRRRRGSGGSGSGYIPEAPRDGQAYVRKDGEWVLLSTFLG

SEQ ID NO: 152 - DNA, 3840 bp, Artificial Sequence
  WuS_3F_D2P_GlyD3_pVax
ggatccgccaccatggactggacatggatacttttcttggtagcggcggcgacacgcgtgcactccatgtttgttttcctcgtcctgctcccacttgtctcaagtcaatgcgttaacctgactacgaggacgcagctcccgcccgcctacacaaactcttttacccggggtgtgtactaccccgacaaagttttccgcagttcatgtctccactcaacacaggacctctttctgccattcttctcaaatgtcacatggtttcacgccatccacgtttccggcactaacggtaccaaacggttcgacaaccctgttctgccattcaatgatggggtgtattttgcgagcacagagaagtccaatataatcagaggttggatcttcggtacaacgctggacagtaaaactcaatctctgctgatagtgaataacgctacgaacgtcgtcattaaggtgtgcgagtttcaattttgcaacgatccattcttgggagtgtactatcataagaacaacaaatcatggatggagagcgagtttagggtgtattcctctgcaaacaactgtacatttgaatacgtgagccagccttttcttatggacctcgaaggtaagcaaggtaacttcaagaacttgcgggaatttgttttcaagaacattgatggatacttcaaaatttactccaaacatacccctatcaatctggtccgcgaccttccacaaggattttccgcacttgaacccttggtcgacctgcctattggaatcaatatcacgcggtttcagacgcttctcgctctccatagatcctacctcacgcccggcgacagttcaagtgggtggaccgcaggcgcggcggcctattatgtgggatacttgcaaccccgcacttttctcctgaaatataatgagaatgggaccataaccgatgcagttgattgtgccttggaccccctgtccgagaccaaatgcacgctgaagtctttcacagtagagaagggaatttaccaaacttccaacttcagagttcaacccacagaatctatcgttcgctttcccaatattacaaatttgtgtccgtttggagaggtgttcaatgctacaaggtttgcttccgtatatgcctggaatcgtaaacgcatctctaattgcgtagcggactactcagttttgtataacagtgctagcttctccactttcaagtgttacggcgttaatgggaccaagctgaatgacctgtgttttaccaacgtgtatgctgactccttcgtaataagaggggatgaggttaggcaaatcgcccctggccagacagggaaaatcgctgattacaattacaagttgccagatgactttaccgggtgtgtcatcgcttggaactccaataatctggattccaaagttggtgggaactataattacctctatcggctgttcagaaaatccaaccttaagcccttcgaaagagatatcaacactacaatttatcaggctggttcaactccgtgtaatggggtcgagggtttcaactgctacttcccgttgcagagttatgggttccagccgacgaatggggtcgggtaccaaccgtacagagtagtagttctgtcctttgagttgaatcatgccccagcaacagtgtgcggcccaaagaaatcaacaaaccttgttaagaataaatgcgtgaacttcaactttaacgggcttactgggactggggtgctcacagaatccaacaagaaattcttgccattccaacaatttggccgcgattgtgcagatacaaccgacgccgtgagagatccccaaacattggagatacttgatatcactccctgctcttttggtggcgtcagcgtcatcaccccaggaaccaatacaagcaatcaagtggctgtcctttatcaagatgtcaattgtaccgaagtcccagtcgcaatacatgcggatcaactgaccccaacatggagagtttactcaacgggatctaacgtgtttcaaactcgtgctggctgcctgataggagcggagcatgtgaataattcctatgaatgcgacattcccattggggctggaatctgtgcatcctatcaaacacaaactaactctccccgccggcggcggagcgtcgccagccaaagcattattgcatatacgatgtccctgtgcgcagaaaattctgttgcatacagcaataactccatcgctatccctacaaactttaccatcagctgtacaaccgaaatcttgcccgtttctatgactaaaacaagttgtgactgcactatgtacatctgtggcgactcaacagagtgttctaaccttctgcttcaatatggatctttctgtacacaacttaatcgcgctctcaccggtatagctgttgagcaagataagaacactcaggaagttttcgcccaagtcaaacaatgttataaaacaccacccataaaagacttcggcggatttaatttctctcaaatactgccggacccatccaggagacgaagaagcttcatagaagatcttctcttcaacaaggtgaccctggccgatgcggggtttatcaagcaatatggcgactgtctcggcgatattgctgcacgcgatctgatatgtgcacagaaattcaatgggtgtaccgtgctcccacctctgctgacagatgaaatgatcgctcaatataccagtgcgctcttggctggaacaattactagtggttggacttttggggctggagccgcactccaaatcccttttgccatgcaaatggcctatcgctttaatgggataggggtcactcagaatgtcttgtatgaaaaccagaagttgattgctaaccaatttaattcagctatagggaaaattcaagacagcctcagtagtactgccagtgccctgggcaaactgcaagatgtcgtgaaccaaaatgctcaagccctgaataccctcgttaagcaacttagctcaaactttggtgcgatttcctcaggccctaatgacatcctctcaaggctgcctaaagtggaagctgaggtccaaatcgatcgcctgattacgggtcgcctgcaatcactccaaacatatgtcacccagcagttgatcagagcggccgagatacgggcatcagcaaatttggcggccacgaaaatgtcagagtgcgtacttggtcaaagtaaaagagttgatttctgcggaaaaggttaccaccttatgtctttcccccagtccgctccacatggagtggtctttctgcattgtacttatgtgccagcccaagaaaagaattttactaccgcccccgctatttgtcatgatggtaaggcgcacttccccagagaaggagtgtttgtgtccaacgggactcactggtttgtgactcaaaggaacttttatgaacctcaaattatcaccacagataacacatttgtgtccgggaattgcgatgtggttatcggcattgttaataataccgtttacgatcccttgcaacctgagttggatagtttcaaggaagaacttgacaaatactttaagaatcacacttccccggatgtagacctcggggacatttccggaattaatgcgagtgttgtgaatatacagaaagagatagaccgactcaacgaggttgctaagaacctcaacgagagccttatcgatcttcaagaactcggcaaatacgagcaatacattaaatggccttggtccggcagaaggagacggcgaaggggaagtggcggcagcggctctggatacatcccggaagctccacgggatgggcaagcatatgttcgcaaggatggagaatgggtccttcttagcaccttcttgggataatga

SEQ ID NO: 153 - RNA, 3840 nt, Artificial Sequence
  WuS_3F_D2P_GlyD3_pVax
ggauccgccaccauggacuggacauggauacuuuucuugguagcggcggcgacacgcgugcacuccauguuuguuuuccucguccugcucccacuugucucaagucaaugcguuaaccugacuacgaggacgcagcucccgcccgccuacacaaacucuuuuacccgggguguguacuaccccgacaaaguuuuccgcaguucaugucuccacucaacacaggaccucuuucugccauucuucucaaaugucacaugguuucacgccauccacguuuccggcacuaacgguaccaaacgguucgacaacccuguucugccauucaaugaugggguguauuuugcgagcacagagaaguccaauauaaucagagguuggaucuucgguacaacgcuggacaguaaaacucaaucucugcugauagugaauaacgcuacgaacgucgucauuaaggugugcgaguuucaauuuugcaacgauccauucuugggaguguacuaucauaagaacaacaaaucauggauggagagcgaguuuaggguguauuccucugcaaacaacuguacauuugaauacgugagccagccuuuucuuauggaccucgaagguaagcaagguaacuucaagaacuugcgggaauuuguuuucaagaacauugauggauacuucaaaauuuacuccaaacauaccccuaucaaucugguccgcgaccuuccacaaggauuuuccgcacuugaacccuuggucgaccugccuauuggaaucaauaucacgcgguuucagacgcuucucgcucuccauagauccuaccucacgcccggcgacaguucaaguggguggaccgcaggcgcggcggccuauuaugugggauacuugcaaccccgcacuuuucuccugaaauauaaugagaaugggaccauaaccgaugcaguugauugugccuuggacccccuguccgagaccaaaugcacgcugaagucuuucacaguagagaagggaauuuaccaaacuuccaacuucagaguucaacccacagaaucuaucguucgcuuucccaauauuacaaauuuguguccguuuggagagguguucaaugcuacaagguuugcuuccguauaugccuggaaucguaaacgcaucucuaauugcguagcggacuacucaguuuuguauaacagugcuagcuucuccacuuucaaguguuacggcguuaaugggaccaagcugaaugaccuguguuuuaccaacguguaugcugacuccuucguaauaagaggggaugagguuaggcaaaucgccccuggccagacagggaaaaucgcugauuacaauuacaaguugccagaugacuuuaccgggugugucaucgcuuggaacuccaauaaucuggauuccaaaguuggugggaacuauaauuaccucuaucggcuguucagaaaauccaaccuuaagcccuucgaaagagauaucaacacuacaauuuaucaggcugguucaacuccguguaauggggucgaggguuucaacugcuacuucccguugcagaguuauggguuccagccgacgaauggggucggguaccaaccguacagaguaguaguucuguccuuugaguugaaucaugccccagcaacagugugcggcccaaagaaaucaacaaaccuuguuaagaauaaaugcgugaacuucaacuuuaacgggcuuacugggacuggggugcucacagaauccaacaagaaauucuugccauuccaacaauuuggccgcgauugugcagauacaaccgacgccgugagagauccccaaacauuggagauacuugauaucacucccugcucuuuugguggcgucagcgucaucaccccaggaaccaauacaagcaaucaaguggcuguccuuuaucaagaugucaauuguaccgaagucccagucgcaauacaugcggaucaacugaccccaacauggagaguuuacucaacgggaucuaacguguuucaaacucgugcuggcugccugauaggagcggagcaugugaauaauuccuaugaaugcgacauucccauuggggcuggaaucugugcauccuaucaaacacaaacuaacucuccccgccggcggcggagcgucgccagccaaagcauuauugcauauacgaugucccugugcgcagaaaauucuguugcauacagcaauaacuccaucgcuaucccuacaaacuuuaccaucagcuguacaaccgaaaucuugcccguuucuaugacuaaaacaaguugugacugcacuauguacaucuguggcgacucaacagaguguucuaaccuucugcuucaauauggaucuuucuguacacaacuuaaucgcgcucucaccgguauagcuguugagcaagauaagaacacucaggaaguuuucgcccaagucaaacaauguuauaaaacaccacccauaaaagacuucggcggauuuaauuucucucaaauacugccggacccauccaggagacgaagaagcuucauagaagaucuucucuucaacaaggugacccuggccgaugcgggguuuaucaagcaauauggcgacugucucggcgauauugcugcacgcgaucugauaugugcacagaaauucaauggguguaccgugcucccaccucugcugacagaugaaaugaucgcucaauauaccagugcgcucuuggcuggaacaauuacuagugguuggacuuuuggggcuggagccgcacuccaaaucccuuuugccaugcaaauggccuaucgcuuuaaugggauaggggucacucagaaugucuuguaugaaaaccagaaguugauugcuaaccaauuuaauucagcuauagggaaaauucaagacagccucaguaguacugccagugcccugggcaaacugcaagaugucgugaaccaaaaugcucaagcccugaauacccucguuaagcaacuuagcucaaacuuuggugcgauuuccucaggcccuaaugacauccucucaaggcugccuaaaguggaagcugagguccaaaucgaucgccugauuacgggucgccugcaaucacuccaaacauaugucacccagcaguugaucagagcggccgagauacgggcaucagcaaauuuggcggccacgaaaaugucagagugcguacuuggucaaaguaaaagaguugauuucugcggaaaagguuaccaccuuaugucuuucccccaguccgcuccacauggaguggucuuucugcauuguacuuaugugccagcccaagaaaagaauuuuacuaccgcccccgcuauuugucaugaugguaaggcgcacuuccccagagaaggaguguuuguguccaacgggacucacugguuugugacucaaaggaacuuuuaugaaccucaaauuaucaccacagauaacacauuuguguccgggaauugcgaugugguuaucggcauuguuaauaauaccguuuacgaucccuugcaaccugaguuggauaguuucaaggaagaacuugacaaauacuuuaagaaucacacuuccccggauguagaccucggggacauuuccggaauuaaugcgaguguugugaauauacagaaagagauagaccgacucaacgagguugcuaagaaccucaacgagagccuuaucgaucuucaagaacucggcaaauacgagcaauacauuaaauggccuugguccggcagaaggagacggcgaaggggaaguggcggcagcggcucuggauacaucccggaagcuccacgggaugggcaagcauauguucgcaaggauggagaauggguccuucuuagcaccuucuugggauaauga

SEQ ID NO: 154 - protein, 1274 aa, Artificial Sequence
  WuS_3F_D2P_GlyD3_pVax
MDWTWILFLVAAATRVHSMFVFLVLLPLVSSQCVNLTTRTQLPPAYTNSFTRGVYYPDKVFRSSCLHSTQDLFLPFFSNVTWFHAIHVSGTNGTKRFDNPVLPFNDGVYFASTEKSNIIRGWIFGTTLDSKTQSLLIVNNATNVVIKVCEFQFCNDPFLGVYYHKNNKSWMESEFRVYSSANNCTFEYVSQPFLMDLEGKQGNFKNLREFVFKNIDGYFKIYSKHTPINLVRDLPQGFSALEPLVDLPIGINITRFQTLLALHRSYLTPGDSSSGWTAGAAAYYVGYLQPRTFLLKYNENGTITDAVDCALDPLSETKCTLKSFTVEKGIYQTSNFRVQPTESIVRFPNITNLCPFGEVFNATRFASVYAWNRKRISNCVADYSVLYNSASFSTFKCYGVNGTKLNDLCFTNVYADSFVIRGDEVRQIAPGQTGKIADYNYKLPDDFTGCVIAWNSNNLDSKVGGNYNYLYRLFRKSNLKPFERDINTTIYQAGSTPCNGVEGFNCYFPLQSYGFQPTNGVGYQPYRVVVLSFELNHAPATVCGPKKSTNLVKNKCVNFNFNGLTGTGVLTESNKKFLPFQQFGRDCADTTDAVRDPQTLEILDITPCSFGGVSVITPGTNTSNQVAVLYQDVNCTEVPVAIHADQLTPTWRVYSTGSNVFQTRAGCLIGAEHVNNSYECDIPIGAGICASYQTQTNSPRRRRSVASQSIIAYTMSLCAENSVAYSNNSIAIPTNFTISCTTEILPVSMTKTSCDCTMYICGDSTECSNLLLQYGSFCTQLNRALTGIAVEQDKNTQEVFAQVKQCYKTPPIKDFGGFNFSQILPDPSRRRRSFIEDLLFNKVTLADAGFIKQYGDCLGDIAARDLICAQKFNGCTVLPPLLTDEMIAQYTSALLAGTITSGWTFGAGAALQIPFAMQMAYRFNGIGVTQNVLYENQKLIANQFNSAIGKIQDSLSSTASALGKLQDVVNQNAQALNTLVKQLSSNFGAISSGPNDILSRLPKVEAEVQIDRLITGRLQSLQTYVTQQLIRAAEIRASANLAATKMSECVLGQSKRVDFCGKGYHLMSFPQSAPHGVVFLHCTYVPAQEKNFTTAPAICHDGKAHFPREGVFVSNGTHWFVTQRNFYEPQIITTDNTFVSGNCDVVIGIVNNTVYDPLQPELDSFKEELDKYFKNHTSPDVDLGDISGINASVVNIQKEIDRLNEVAKNLNESLIDLQELGKYEQYIKWPWSGRRRRRRGSGGSGSGYIPEAPRDGQAYVRKDGEWVLLSTFLG

SEQ ID NO: 155 - DNA, 3840 bp, Artificial Sequence
  WuS_3F_D2P_GlyD2_pVax
ggatccgccaccatggattggacatggatactgtttctggtcgctgctgccacacgtgtccacagcatgtttgtcttcttggtgctcttgcctcttgtgagctcccaatgtgtgaatctgactacacgtacgcaacttccgcctgcctacaccaactctttcaccagaggcgtgtattatccggataaggtgttcaggagctcctgccttcattcaacacaggatttgtttctgcctttcttttcaaacgttacttggttccatgccatccacgtgtcaggaacaaatggtaccaagagattcgataacccagttctcccttttaatgatggagtctattttgcaagcactgagaaaagtaatattatacgaggttggattttcggaacgacactcgacagtaaaacacaatccctgttgatagtcaacaatgccacgaacgtagttataaaagtttgcgaatttcaattttgcaacgatcctttcctgggtgtgtactatcacaagaacaacaaatcttggatggaaagcgagtttcgagtgtattcttcagcaaacaactgtactttcgaatatgtttctcaaccattcctgatggatctcgaaggtaaacagggcaactttaagaatctgagagagtttgtgtttaagaacattgacggctattttaagatttacagcaaacatacgcctataaaccttgtgagagacctgcctcaagggtttagcgccctggaaccactcgtggacctgcctatcggcatcaatattaccagatttcaaacgctccttgccctgcataggagctatttgacacctggggactcttctagcggctggactgcaggcgctgccgcttattacgtgggatatctccagcctagaactttcctcttgaaatacaacgagaatggaaccataacagacgcagttgattgtgctctcgaccccttgtccgagaccaaatgcacactgaaaagttttaccgtggagaaagggatctatcaaactagtaatttccgcgttcaacccactgagagcatagtgaggtttcctaacattacaaatctttgcccgtttggggaagtgtttaatgccactcgttttgctagtgtatacgcctggaatcgaaagcggatttccaattgcgttgctgactacagtgtactctataatagcgcttcatttagcaccttcaagtgctacggggttaacgggaccaaactcaatgacctctgcttcacgaacgtttacgccgactcctttgtcattcgaggtgacgaagtaagacaaatcgccccaggccagactggaaagatcgcggactacaactataagctgccagacgacttcactggatgtgtgatcgcctggaatagtaacaacctcgactccaaggtgggtggcaattacaattatctctataggctgttcaggaagagtaatttgaaaccattcgagcgcgacataaatacaacaatctaccaagcgggttctaccccttgcaacggcgtggaaggttttaattgttacttccctctccaaagctacgggtttcaaccaacaaacggcgtgggataccaaccatacagggtggttgtgttgagcttcgaattgaatcatgcacctgcaacagtgtgtgggcccaagaagtccaccaatctcgttaagaataaatgcgtgaacttcaactttaacgggttgacagggaccggcgtgcttacggaaagtaataagaaattccttcccttccagcaatttggtcgcgactgtgcggatacaacggacgcagtgcgagacccacagacattggagatcctggacataacaccttgctcttttggcggggtctccgtaataacacctggaacaaataccagcaatcaagtagcggtcttgtatcaagatgtaaactgtactgaagtcccagttgctatacatgcagaccaacttacaccgacgtggcgcgtgtattctacgggctccaacgtattccaaaccagagcagggtgcttgataggggcagagcacgtcaacaatagctatgagtgtgatatcccgataggtgctggaatctgcgcaagttaccagacccaaaccaatagcccccgccggagacgatcagtggcaagccagtctataatagcctacacgatgtcactgtgtgccgaaaatagcgttgcctatagtaacaatagcatcgccattccaaccaatttcacaatatcagtcactactgagattctgcctgtgtcaatgactaaaactagtgtggactgcacaatgtatatttgcggcgattccacagaatgtagcaatcttctgctgcaatatgggagtttctgtacacaattgaatcgggcccttactggaatcgccgtagagcaggacaagaacacccaagaagtctttgcgcaagtcaaacaatgttataagactcccccaattaaagattttggcggctttaattttagccaaatacttcccgaccccagccgccgacgacgctcctttatcgaagatctgttgtttaataaagtcacattggctgatgctggctttatcaaacaatacggtgattgtctgggtgatattgcagcccgagatctgatctgcgcccaaaagtttaacggcttgaccgttctcccgccactcctgacagatgagatgatcgcgcaatatacctctgcactcctggcgggaacaatcactagtggttggactttcggcgccggcgctgcactgcaaattcccttcgccatgcaaatggcctatcggtttaacggaattggtgtgactcagaatgtgctttacgaaaatcagaaactcatagctaatcagtttaacagcgcaatcgggaaaattcaggattccctcagcagcaccgctagcgccttgggcaagctgcaggacgttgtaaaccagaacgctcaggccctcaacactctcgttaaacaattgagctctaactttggggccataagcagtggtcctaacgacatcctgagtcgtctgccaaaggtagaggccgaagtgcaaatcgaccggctcatcactggaagactgcaaagcctgcaaacctatgtcacacagcaacttatacgggccgccgaaatcagggcctcagcaaacctcgcagcaacaaagatgagcgagtgtgtgctgggccaatccaagcgcgtggacttctgtggtaagggataccatctgatgtcctttccccaatccgcgcctcatggagtagttttcctgcacgttacgtatgtgcctgcccaagagaagaactttacaacagcaccagccatttgtcatgacggaaaagcccattttcctagagaaggagtctttgtttccaatgggacacattggtttgttacccagcgtaacttttatgagccacaaatcatcaccacggacaatactttcgtgagcggtaattgtgatgtggtcattggcatagtgaataacactgtttacgaccccctgcaaccggaattggacagcttcaaagaagaactggacaagtacttcaagaaccacacatccccagacgtagacctcggagatatttccggaattaacgcatcagtagttaacatccagaaagaaatagatcgactgaatgaggtcgctaagaacttgaacgaatcacttatagatctccaggaactcggcaaatatgagcaatatattaaatggccctggtcaggtcgcagaagacgccgccggggttccggcggatctggatctggatatattcccgaagctccacgggatgggcaagcctacgtaagaaaggatggagaatgggtacttttgtccacgttcttgggctagtag

SEQ ID NO: 156 - RNA, 3840 nt, Artificial Sequence
  WuS_3F_D2P_GlyD2_pVax
ggauccgccaccauggauuggacauggauacuguuucuggucgcugcugccacacguguccacagcauguuugucuucuuggugcucuugccucuugugagcucccaaugugugaaucugacuacacguacgcaacuuccgccugccuacaccaacucuuucaccagaggcguguauuauccggauaagguguucaggagcuccugccuucauucaacacaggauuuguuucugccuuucuuuucaaacguuacuugguuccaugccauccacgugucaggaacaaaugguaccaagagauucgauaacccaguucucccuuuuaaugauggagucuauuuugcaagcacugagaaaaguaauauuauacgagguuggauuuucggaacgacacucgacaguaaaacacaaucccuguugauagucaacaaugccacgaacguaguuauaaaaguuugcgaauuucaauuuugcaacgauccuuuccuggguguguacuaucacaagaacaacaaaucuuggauggaaagcgaguuucgaguguauucuucagcaaacaacuguacuuucgaauauguuucucaaccauuccugauggaucucgaagguaaacagggcaacuuuaagaaucugagagaguuuguguuuaagaacauugacggcuauuuuaagauuuacagcaaacauacgccuauaaaccuugugagagaccugccucaaggguuuagcgcccuggaaccacucguggaccugccuaucggcaucaauauuaccagauuucaaacgcuccuugcccugcauaggagcuauuugacaccuggggacucuucuagcggcuggacugcaggcgcugccgcuuauuacgugggauaucuccagccuagaacuuuccucuugaaauacaacgagaauggaaccauaacagacgcaguugauugugcucucgaccccuuguccgagaccaaaugcacacugaaaaguuuuaccguggagaaagggaucuaucaaacuaguaauuuccgcguucaacccacugagagcauagugagguuuccuaacauuacaaaucuuugcccguuuggggaaguguuuaaugccacucguuuugcuaguguauacgccuggaaucgaaagcggauuuccaauugcguugcugacuacaguguacucuauaauagcgcuucauuuagcaccuucaagugcuacgggguuaacgggaccaaacucaaugaccucugcuucacgaacguuuacgccgacuccuuugucauucgaggugacgaaguaagacaaaucgccccaggccagacuggaaagaucgcggacuacaacuauaagcugccagacgacuucacuggaugugugaucgccuggaauaguaacaaccucgacuccaagguggguggcaauuacaauuaucucuauaggcuguucaggaagaguaauuugaaaccauucgagcgcgacauaaauacaacaaucuaccaagcggguucuaccccuugcaacggcguggaagguuuuaauuguuacuucccucuccaaagcuacggguuucaaccaacaaacggcgugggauaccaaccauacagggugguuguguugagcuucgaauugaaucaugcaccugcaacagugugugggcccaagaaguccaccaaucucguuaagaauaaaugcgugaacuucaacuuuaacggguugacagggaccggcgugcuuacggaaaguaauaagaaauuccuucccuuccagcaauuuggucgcgacugugcggauacaacggacgcagugcgagacccacagacauuggagauccuggacauaacaccuugcucuuuuggcggggucuccguaauaacaccuggaacaaauaccagcaaucaaguagcggucuuguaucaagauguaaacuguacugaagucccaguugcuauacaugcagaccaacuuacaccgacguggcgcguguauucuacgggcuccaacguauuccaaaccagagcagggugcuugauaggggcagagcacgucaacaauagcuaugagugugauaucccgauaggugcuggaaucugcgcaaguuaccagacccaaaccaauagcccccgccggagacgaucaguggcaagccagucuauaauagccuacacgaugucacugugugccgaaaauagcguugccuauaguaacaauagcaucgccauuccaaccaauuucacaauaucagucacuacugagauucugccugugucaaugacuaaaacuaguguggacugcacaauguauauuugcggcgauuccacagaauguagcaaucuucugcugcaauaugggaguuucuguacacaauugaaucgggcccuuacuggaaucgccguagagcaggacaagaacacccaagaagucuuugcgcaagucaaacaauguuauaagacucccccaauuaaagauuuuggcggcuuuaauuuuagccaaauacuucccgaccccagccgccgacgacgcuccuuuaucgaagaucuguuguuuaauaaagucacauuggcugaugcuggcuuuaucaaacaauacggugauugucugggugauauugcagcccgagaucugaucugcgcccaaaaguuuaacggcuugaccguucucccgccacuccugacagaugagaugaucgcgcaauauaccucugcacuccuggcgggaacaaucacuagugguuggacuuucggcgccggcgcugcacugcaaauucccuucgccaugcaaauggccuaucgguuuaacggaauuggugugacucagaaugugcuuuacgaaaaucagaaacucauagcuaaucaguuuaacagcgcaaucgggaaaauucaggauucccucagcagcaccgcuagcgccuugggcaagcugcaggacguuguaaaccagaacgcucaggcccucaacacucucguuaaacaauugagcucuaacuuuggggccauaagcagugguccuaacgacauccugagucgucugccaaagguagaggccgaagugcaaaucgaccggcucaucacuggaagacugcaaagccugcaaaccuaugucacacagcaacuuauacgggccgccgaaaucagggccucagcaaaccucgcagcaacaaagaugagcgagugugugcugggccaauccaagcgcguggacuucugugguaagggauaccaucugauguccuuuccccaauccgcgccucauggaguaguuuuccugcacguuacguaugugccugcccaagagaagaacuuuacaacagcaccagccauuugucaugacggaaaagcccauuuuccuagagaaggagucuuuguuuccaaugggacacauugguuuguuacccagcguaacuuuuaugagccacaaaucaucaccacggacaauacuuucgugagcgguaauugugauguggucauuggcauagugaauaacacuguuuacgacccccugcaaccggaauuggacagcuucaaagaagaacuggacaaguacuucaagaaccacacauccccagacguagaccucggagauauuuccggaauuaacgcaucaguaguuaacauccagaaagaaauagaucgacugaaugaggucgcuaagaacuugaacgaaucacuuauagaucuccaggaacucggcaaauaugagcaauauauuaaauggcccuggucaggucgcagaagacgccgccgggguuccggcggaucuggaucuggauauauucccgaagcuccacgggaugggcaagccuacguaagaaaggauggagaauggguacuuuuguccacguucuugggcuaguag

SEQ ID NO: 157 - protein, 1274 aa, Artificial Sequence
  WuS_3F_D2P_GlyD2_pVax
MDWTWILFLVAAATRVHSMFVFLVLLPLVSSQCVNLTTRTQLPPAYTNSFTRGVYYPDKVFRSSCLHSTQDLFLPFFSNVTWFHAIHVSGTNGTKRFDNPVLPFNDGVYFASTEKSNIIRGWIFGTTLDSKTQSLLIVNNATNVVIKVCEFQFCNDPFLGVYYHKNNKSWMESEFRVYSSANNCTFEYVSQPFLMDLEGKQGNFKNLREFVFKNIDGYFKIYSKHTPINLVRDLPQGFSALEPLVDLPIGINITRFQTLLALHRSYLTPGDSSSGWTAGAAAYYVGYLQPRTFLLKYNENGTITDAVDCALDPLSETKCTLKSFTVEKGIYQTSNFRVQPTESIVRFPNITNLCPFGEVFNATRFASVYAWNRKRISNCVADYSVLYNSASFSTFKCYGVNGTKLNDLCFTNVYADSFVIRGDEVRQIAPGQTGKIADYNYKLPDDFTGCVIAWNSNNLDSKVGGNYNYLYRLFRKSNLKPFERDINTTIYQAGSTPCNGVEGFNCYFPLQSYGFQPTNGVGYQPYRVVVLSFELNHAPATVCGPKKSTNLVKNKCVNFNFNGLTGTGVLTESNKKFLPFQQFGRDCADTTDAVRDPQTLEILDITPCSFGGVSVITPGTNTSNQVAVLYQDVNCTEVPVAIHADQLTPTWRVYSTGSNVFQTRAGCLIGAEHVNNSYECDIPIGAGICASYQTQTNSPRRRRSVASQSIIAYTMSLCAENSVAYSNNSIAIPTNFTISVTTEILPVSMTKTSVDCTMYICGDSTECSNLLLQYGSFCTQLNRALTGIAVEQDKNTQEVFAQVKQCYKTPPIKDFGGFNFSQILPDPSRRRRSFIEDLLFNKVTLADAGFIKQYGDCLGDIAARDLICAQKFNGLTVLPPLLTDEMIAQYTSALLAGTITSGWTFGAGAALQIPFAMQMAYRFNGIGVTQNVLYENQKLIANQFNSAIGKIQDSLSSTASALGKLQDVVNQNAQALNTLVKQLSSNFGAISSGPNDILSRLPKVEAEVQIDRLITGRLQSLQTYVTQQLIRAAEIRASANLAATKMSECVLGQSKRVDFCGKGYHLMSFPQSAPHGVVFLHVTYVPAQEKNFTTAPAICHDGKAHFPREGVFVSNGTHWFVTQRNFYEPQIITTDNTFVSGNCDVVIGIVNNTVYDPLQPELDSFKEELDKYFKNHTSPDVDLGDISGINASVVNIQKEIDRLNEVAKNLNESLIDLQELGKYEQYIKWPWSGRRRRRRGSGGSGSGYIPEAPRDGQAYVRKDGEWVLLSTFLG

SEQ ID NO: 158 - DNA, 3840 bp, Artificial Sequence
  WuS_3F_D2P_GlyD1_pVax
ggatccgccaccatggactggacatggatacttttcttggtggcagctgctacacgcgtccactcaatgttcgtctttctggtgctcttgccactggtgagcagccaatgcgttaacctcaccacacgcacgcagcttccacccgcatacactaactcctttacgcgcggcgtgtactatccagataaagtgttccgaagtagcgtcttgcatagcacccaggatctgtttctcccattctttagcaatgtcacatggttccacgctatccacgtgtctgggacgaatggaactaaacgttttgacaatcctgttcttccttttaacgacggcgtatactttgctagtactgagaagtctaacattatccgcggctggattttcgggacaaccctggactccaaaacccagtctctgctgatagtaaacaatgccaccaacgtcgtcattaaagtgtgcgagtttcaattctgcaacgacccctttctgggtgtctattaccacaagaacaataagtcttggatggagtcagaatttcgtgtctattcttctgccaataattgtacatttgagtatgtttctcaaccctttctcatggacctcgaaggcaagcaggggaattttaagaacctgcgggaattcgtctttaagaatatcgacggctatttcaaaatttacagcaaacacacgcctataaacctcgtgcgagatctcccccaaggcttctcagcattggagccattggtcgacttgccaatcggaattaatatcacaaggtttcagactctgctggccctgcatcgctcctatcttacccctggcgattcctcaagtggctggacggccggcgcagcagcctattacgtcggctatctccagccaaggacgtttcttttgaagtataatgaaaatgggactattactgacgccgtcgactgcgctttggaccccctgagcgagacaaagtgcacattgaaaagcttcacggtggagaagggtatttatcaaacttccaactttagggtgcaaccaacagagagcatcgtgaggttccctaatatcactaatctctgtccatttggcgaggtgtttaacgcgaccagatttgcaagcgtatatgcctggaataggaagagaataagcaattgtgttgccgattactctgtcttgtataacagcgcatctttcagcacttttaagtgctatggtgtcaacgggacaaaacttaacgatctttgcttcaccaacgtttacgcagactcttttgtcatacgcggagatgaggtccgacaaatagctcccggccagactgggaaaatcgctgattataactataagcttccagatgacttcacaggatgcgtaattgcatggaactctaacaacctggactcaaaagttggtggcaactataactatctctatcgtttgttccgaaaatcaaaccttaaaccctttgaacgggatattaatacgacaatttaccaagcagggagcactccttgtaacggtgtagaaggtttcaattgttattttcctctgcaatcatacggattccaaccaacaaacggtgtgggttatcaaccttatcgggttgtagttttgagcttcgagcttaaccatgcacccgccacagtatgcggaccgaagaagagtacaaacctggttaagaataaatgtgtaaacttcaactttaatggactgacggggacgggagtactcactgaaagcaataagaaattcttgccttttcagcaattcgggcgggacatagcggacactacagacgccgtgcgcgacccccagactctcgaaatcctggacataaccccgtgctcatttggcggagtttcagtcatcactccagggaccaatacctcaaaccaagtagctgtgctgtatcaagatgtgaattgcaccgaagtaccagtggccattcacgccgatcagctgaccccgacatggcgggtgtactcaaccggttcaaatgtgtttcaaacaagagcaggttgtcttattggcgctgaacacgtgaataactcctatgaatgcgacatcccaattggtgccggaatctgtgcctcttatcaaacacaaactaattcaccaaggcgtaggcgcagcgtcgcctctcaatcaattatagcctacaccatgtcactgggtgccgaaaactccgtcgcgtacagcaacaatagcattgccatccctaccaacttcaccatcagctgtacaactgagatcctgcctgtatccatgacaaagacatcctgcgattgcactatgtacatctgtggagactctactgagtgtagcaacctcttgctccaatacgggagtttctgtacgcaactcaaccgtgccctcaccggcatagccgtagagcaagataagaatacccaggaagtatttgcccaagtaaagcaaatttataagacgccacccattaaagactttggcggtttcaacttcagtcaaatactgccagacccgtctcgcaggagaaggagttttattgaagacctgctctttaacaaggtgactcttgccgatgctggatttattaaacaatatggggattgtctcggagatatcgctgctcgggatcttatctgcgcgcagaaattcaacgggtgtaccgtgctcccacccttgctcactgacgaaatgatcgcgcaatatacctcagcacttctggcgggaactattacatctggttggacattcggcgcaggggcagctctccaaattcccttcgcaatgcaaatggcttacaggttcaatggcataggtgtcacacaaaacgtgctgtacgagaatcaaaagcttatagccaatcagtttaatagcgccataggcaagatccaagattccctgagctccacggcaagcgctctgggaaaattgcaagacgtagtcaatcaaaacgctcaagcgctgaatacccttgtgaaacaactttcttcaaactttggagctatctcatctgggcccaacgatattctgagtcgactgccaaaggttgaagctgaagtccaaattgatcggttgatcacaggaaggctgcaatccctgcagacttacgtgacccagcaactgatcagggcagccgaaataagggcttccgccaatctggcagccacaaagatgtctgaatgtgtcttgggtcaaagcaaacgcgtcgatttctgtggcaaggggtaccatctgatgtcattccctcaatctgcccctcacggtgtggtatttctccattgcacttatgttcccgcacaggagaagaacttcacaacagctcccgccatttgccacgacggaaaggcgcattttccccgcgaaggtgtcttcgtgtccaatgggactcattggtttgtgactcagaggaatttctatgagccgcagattatcaccaccgacaacactttcgtctccggtaactgcgacgtcgttatcggaatcgtcaataacacagtgtatgatcctctgcagccggagctggactcattcaaagaggagttggataaatattttaagaatcatacaagccccgacgtcgatctgggcgatattagtggtatcaatgcgtccgtggttaacattcagaaagagattgacagactcaatgaggtcgccaagaacttgaacgaatccttgattgatctccaggagttgggcaagtatgagcaatatatcaagtggccatggtctgggcgaaggcgccgtcgcagagggtccggcggtagtggttccgggtacataccagaagctccacgagatggtcaagcttatgtaaggaaagacggagagtgggtcctgcttagcacattcttgggttgataa

SEQ ID NO: 159 - RNA, 3840 nt, Artificial Sequence
  WuS_3F_D2P_GlyD1_pVax
ggauccgccaccauggacuggacauggauacuuuucuugguggcagcugcuacacgcguccacucaauguucgucuuucuggugcucuugccacuggugagcagccaaugcguuaaccucaccacacgcacgcagcuuccacccgcauacacuaacuccuuuacgcgcggcguguacuauccagauaaaguguuccgaaguagcgucuugcauagcacccaggaucuguuucucccauucuuuagcaaugucacaugguuccacgcuauccacgugucugggacgaauggaacuaaacguuuugacaauccuguucuuccuuuuaacgacggcguauacuuugcuaguacugagaagucuaacauuauccgcggcuggauuuucgggacaacccuggacuccaaaacccagucucugcugauaguaaacaaugccaccaacgucgucauuaaagugugcgaguuucaauucugcaacgaccccuuucugggugucuauuaccacaagaacaauaagucuuggauggagucagaauuucgugucuauucuucugccaauaauuguacauuugaguauguuucucaacccuuucucauggaccucgaaggcaagcaggggaauuuuaagaaccugcgggaauucgucuuuaagaauaucgacggcuauuucaaaauuuacagcaaacacacgccuauaaaccucgugcgagaucucccccaaggcuucucagcauuggagccauuggucgacuugccaaucggaauuaauaucacaagguuucagacucugcuggcccugcaucgcuccuaucuuaccccuggcgauuccucaaguggcuggacggccggcgcagcagccuauuacgucggcuaucuccagccaaggacguuucuuuugaaguauaaugaaaaugggacuauuacugacgccgucgacugcgcuuuggacccccugagcgagacaaagugcacauugaaaagcuucacgguggagaaggguauuuaucaaacuuccaacuuuagggugcaaccaacagagagcaucgugagguucccuaauaucacuaaucucuguccauuuggcgagguguuuaacgcgaccagauuugcaagcguauaugccuggaauaggaagagaauaagcaauuguguugccgauuacucugucuuguauaacagcgcaucuuucagcacuuuuaagugcuauggugucaacgggacaaaacuuaacgaucuuugcuucaccaacguuuacgcagacucuuuugucauacgcggagaugagguccgacaaauagcucccggccagacugggaaaaucgcugauuauaacuauaagcuuccagaugacuucacaggaugcguaauugcauggaacucuaacaaccuggacucaaaaguugguggcaacuauaacuaucucuaucguuuguuccgaaaaucaaaccuuaaacccuuugaacgggauauuaauacgacaauuuaccaagcagggagcacuccuuguaacgguguagaagguuucaauuguuauuuuccucugcaaucauacggauuccaaccaacaaacgguguggguuaucaaccuuaucggguuguaguuuugagcuucgagcuuaaccaugcacccgccacaguaugcggaccgaagaagaguacaaaccugguuaagaauaaauguguaaacuucaacuuuaauggacugacggggacgggaguacucacugaaagcaauaagaaauucuugccuuuucagcaauucgggcgggacauagcggacacuacagacgccgugcgcgacccccagacucucgaaauccuggacauaaccccgugcucauuuggcggaguuucagucaucacuccagggaccaauaccucaaaccaaguagcugugcuguaucaagaugugaauugcaccgaaguaccaguggccauucacgccgaucagcugaccccgacauggcggguguacucaaccgguucaaauguguuucaaacaagagcagguugucuuauuggcgcugaacacgugaauaacuccuaugaaugcgacaucccaauuggugccggaaucugugccucuuaucaaacacaaacuaauucaccaaggcguaggcgcagcgucgccucucaaucaauuauagccuacaccaugucacugggugccgaaaacuccgucgcguacagcaacaauagcauugccaucccuaccaacuucaccaucagcuguacaacugagauccugccuguauccaugacaaagacauccugcgauugcacuauguacaucuguggagacucuacugaguguagcaaccucuugcuccaauacgggaguuucuguacgcaacucaaccgugcccucaccggcauagccguagagcaagauaagaauacccaggaaguauuugcccaaguaaagcaaauuuauaagacgccacccauuaaagacuuuggcgguuucaacuucagucaaauacugccagacccgucucgcaggagaaggaguuuuauugaagaccugcucuuuaacaaggugacucuugccgaugcuggauuuauuaaacaauauggggauugucucggagauaucgcugcucgggaucuuaucugcgcgcagaaauucaacggguguaccgugcucccacccuugcucacugacgaaaugaucgcgcaauauaccucagcacuucuggcgggaacuauuacaucugguuggacauucggcgcaggggcagcucuccaaauucccuucgcaaugcaaauggcuuacagguucaauggcauaggugucacacaaaacgugcuguacgagaaucaaaagcuuauagccaaucaguuuaauagcgccauaggcaagauccaagauucccugagcuccacggcaagcgcucugggaaaauugcaagacguagucaaucaaaacgcucaagcgcugaauacccuugugaaacaacuuucuucaaacuuuggagcuaucucaucugggcccaacgauauucugagucgacugccaaagguugaagcugaaguccaaauugaucgguugaucacaggaaggcugcaaucccugcagacuuacgugacccagcaacugaucagggcagccgaaauaagggcuuccgccaaucuggcagccacaaagaugucugaaugugucuugggucaaagcaaacgcgucgauuucuguggcaagggguaccaucugaugucauucccucaaucugccccucacggugugguauuucuccauugcacuuauguucccgcacaggagaagaacuucacaacagcucccgccauuugccacgacggaaaggcgcauuuuccccgcgaaggugucuucguguccaaugggacucauugguuugugacucagaggaauuucuaugagccgcagauuaucaccaccgacaacacuuucgucuccgguaacugcgacgucguuaucggaaucgucaauaacacaguguaugauccucugcagccggagcuggacucauucaaagaggaguuggauaaauauuuuaagaaucauacaagccccgacgucgaucugggcgauauuagugguaucaaugcguccgugguuaacauucagaaagagauugacagacucaaugaggucgccaagaacuugaacgaauccuugauugaucuccaggaguugggcaaguaugagcaauauaucaaguggccauggucugggcgaaggcgccgucgcagaggguccggcgguagugguuccggguacauaccagaagcuccacgagauggucaagcuuauguaaggaaagacggagaguggguccugcuuagcacauucuuggguugauaa

SEQ ID NO: 160 - protein, 1274 aa, Artificial Sequence
  WuS_3F_D2P_GlyD1_pVax
MDWTWILFLVAAATRVHSMFVFLVLLPLVSSQCVNLTTRTQLPPAYTNSFTRGVYYPDKVFRSSVLHSTQDLFLPFFSNVTWFHAIHVSGTNGTKRFDNPVLPFNDGVYFASTEKSNIIRGWIFGTTLDSKTQSLLIVNNATNVVIKVCEFQFCNDPFLGVYYHKNNKSWMESEFRVYSSANNCTFEYVSQPFLMDLEGKQGNFKNLREFVFKNIDGYFKIYSKHTPINLVRDLPQGFSALEPLVDLPIGINITRFQTLLALHRSYLTPGDSSSGWTAGAAAYYVGYLQPRTFLLKYNENGTITDAVDCALDPLSETKCTLKSFTVEKGIYQTSNFRVQPTESIVRFPNITNLCPFGEVFNATRFASVYAWNRKRISNCVADYSVLYNSASFSTFKCYGVNGTKLNDLCFTNVYADSFVIRGDEVRQIAPGQTGKIADYNYKLPDDFTGCVIAWNSNNLDSKVGGNYNYLYRLFRKSNLKPFERDINTTIYQAGSTPCNGVEGFNCYFPLQSYGFQPTNGVGYQPYRVVVLSFELNHAPATVCGPKKSTNLVKNKCVNFNFNGLTGTGVLTESNKKFLPFQQFGRDIADTTDAVRDPQTLEILDITPCSFGGVSVITPGTNTSNQVAVLYQDVNCTEVPVAIHADQLTPTWRVYSTGSNVFQTRAGCLIGAEHVNNSYECDIPIGAGICASYQTQTNSPRRRRSVASQSIIAYTMSLGAENSVAYSNNSIAIPTNFTISCTTEILPVSMTKTSCDCTMYICGDSTECSNLLLQYGSFCTQLNRALTGIAVEQDKNTQEVFAQVKQIYKTPPIKDFGGFNFSQILPDPSRRRRSFIEDLLFNKVTLADAGFIKQYGDCLGDIAARDLICAQKFNGCTVLPPLLTDEMIAQYTSALLAGTITSGWTFGAGAALQIPFAMQMAYRFNGIGVTQNVLYENQKLIANQFNSAIGKIQDSLSSTASALGKLQDVVNQNAQALNTLVKQLSSNFGAISSGPNDILSRLPKVEAEVQIDRLITGRLQSLQTYVTQQLIRAAEIRASANLAATKMSECVLGQSKRVDFCGKGYHLMSFPQSAPHGVVFLHCTYVPAQEKNFTTAPAICHDGKAHFPREGVFVSNGTHWFVTQRNFYEPQIITTDNTFVSGNCDVVIGIVNNTVYDPLQPELDSFKEELDKYFKNHTSPDVDLGDISGINASVVNIQKEIDRLNEVAKNLNESLIDLQELGKYEQYIKWPWSGRRRRRRGSGGSGSGYIPEAPRDGQAYVRKDGEWVLLSTFLG

SEQ ID NO: 161 - DNA, 2999 bp, Artificial Sequence
  pVAX1 backbone
gactcttcgcgatgtacgggccagatatacgcgttgacattgattattgactagttattaatagtaatcaattacggggtcattagttcatagcccatatatggagttccgcgttacataacttacggtaaatggcccgcctggctgaccgcccaacgacccccgcccattgacgtcaataatgacgtatgttcccatagtaacgccaatagggactttccattgacgtcaatgggtggactatttacggtaaactgcccacttggcagtacatcaagtgtatcatatgccaagtacgccccctattgacgtcaatgacggtaaatggcccgcctggcattatgcccagtacatgaccttatgggactttcctacttggcagtacatctacgtattagtcatcgctattaccatggtgatgcggttttggcagtacatcaatgggcgtggatagcggtttgactcacggggatttccaagtctccaccccattgacgtcaatgggagtttgttttggcaccaaaatcaacgggactttccaaaatgtcgtaacaactccgccccattgacgcaaatgggcggtaggcgtgtacggtgggaggtctatataagcagagctctctggctaactagagaacccactgcttactggcttatcgaaattaatacgactcactatagggagacccaagctggctagcgtttaaacttaagcttggtaccgagctcggatccactagtccagtgtggtggaattctgcagatatccagcacagtggcggccgctcgagtctagagggcccgtttaaacccgctgatcagcctcgactgtgccttctagttgccagccatctgttgtttgcccctcccccgtgccttccttgaccctggaaggtgccactcccactgtcctttcctaataaaatgaggaaattgcatcgcattgtctgagtaggtgtcattctattctggggggtggggtggggcaggacagcaagggggaggattgggaagacaatagcaggcatgctggggatgcggtgggctctatggcttctactgggcggttttatggacagcaagcgaaccggaattgccagctggggcgccctctggtaaggttgggaagccctgcaaagtaaactggatggctttctcgccgccaaggatctgatggcgcaggggatcaagctctgatcaagagacaggatgaggatcgtttcgcatgattgaacaagatggattgcacgcaggttctccggccgcttgggtggagaggctattcggctatgactgggcacaacagacaatcggctgctctgatgccgccgtgttccggctgtcagcgcaggggcgcccggttctttttgtcaagaccgacctgtccggtgccctgaatgaactgcaagacgaggcagcgcggctatcgtggctggccacgacgggcgttccttgcgcagctgtgctcgacgttgtcactgaagcgggaagggactggctgctattgggcgaagtgccggggcaggatctcctgtcatctcaccttgctcctgccgagaaagtatccatcatggctgatgcaatgcggcggctgcatacgcttgatccggctacctgcccattcgaccaccaagcgaaacatcgcatcgagcgagcacgtactcggatggaagccggtcttgtcgatcaggatgatctggacgaagagcatcaggggctcgcgccagccgaactgttcgccaggctcaaggcgagcatgcccgacggcgaggatctcgtcgtgacccatggcgatgcctgcttgccgaatatcatggtggaaaatggccgcttttctggattcatcgactgtggccggctgggtgtggcggaccgctatcaggacatagcgttggctacccgtgatattgctgaagagcttggcggcgaatgggctgaccgcttcctcgtgctttacggtatcgccgctcccgattcgcagcgcatcgccttctatcgccttcttgacgagttcttctgaattattaacgcttacaatttcctgatgcggtattttctccttacgcatctgtgcggtatttcacaccgcatacaggtggcacttttcggggaaatgtgcgcggaacccctatttgtttatttttctaaatacattcaaatatgtatccgctcatgagacaataaccctgataaatgcttcaataatagcacgtgctaaaacttcatttttaatttaaaaggatctaggtgaagatcctttttgataatctcatgaccaaaatcccttaacgtgagttttcgttccactgagcgtcagaccccgtagaaaagatcaaaggatcttcttgagatcctttttttctgcgcgtaatctgctgcttgcaaacaaaaaaaccaccgctaccagcggtggtttgtttgccggatcaagagctaccaactctttttccgaaggtaactggcttcagcagagcgcagataccaaatactgtccttctagtgtagccgtagttaggccaccacttcaagaactctgtagcaccgcctacatacctcgctctgctaatcctgttaccagtggctgctgccagtggcgataagtcgtgtcttaccgggttggactcaagacgatagttaccggataaggcgcagcggtcgggctgaacggggggttcgtgcacacagcccagcttggagcgaacgacctacaccgaactgagatacctacagcgtgagctatgagaaagcgccacgcttcccgaagggagaaaggcggacaggtatccggtaagcggcagggtcggaacaggagagcgcacgagggagcttccagggggaaacgcctggtatctttatagtcctgtcgggtttcgccacctctgacttgagcgtcgatttttgtgatgctcgtcaggggggcggagcctatggaaaaacgccagcaacgcggcctttttacggttcctgggcttttgctggccttttgctcacatgttctt

SEQ ID NO: 162 - DNA, 5428 bp, Artificial Sequence
  pcDNA3.1(+) backbone
gacggatcgggagatctcccgatcccctatggtgcactctcagtacaatctgctctgatgccgcatagttaagccagtatctgctccctgcttgtgtgttggaggtcgctgagtagtgcgcgagcaaaatttaagctacaacaaggcaaggcttgaccgacaattgcatgaagaatctgcttagggttaggcgttttgcgctgcttcgcgatgtacgggccagatatacgcgttgacattgattattgactagttattaatagtaatcaattacggggtcattagttcatagcccatatatggagttccgcgttacataacttacggtaaatggcccgcctggctgaccgcccaacgacccccgcccattgacgtcaataatgacgtatgttcccatagtaacgccaatagggactttccattgacgtcaatgggtggagtatttacggtaaactgcccacttggcagtacatcaagtgtatcatatgccaagtacgccccctattgacgtcaatgacggtaaatggcccgcctggcattatgcccagtacatgaccttatgggactttcctacttggcagtacatctacgtattagtcatcgctattaccatggtgatgcggttttggcagtacatcaatgggcgtggatagcggtttgactcacggggatttccaagtctccaccccattgacgtcaatgggagtttgttttggcaccaaaatcaacgggactttccaaaatgtcgtaacaactccgccccattgacgcaaatgggcggtaggcgtgtacggtgggaggtctatataagcagagctctctggctaactagagaacccactgcttactggcttatcgaaattaatacgactcactatagggagacccaagctggctagcgtttaaacttaagcttggtaccgagctcggatccactagtccagtgtggtggaattctgcagatatccagcacagtggcggccgctcgagtctagagggcccgtttaaacccgctgatcagcctcgactgtgccttctagttgccagccatctgttgtttgcccctcccccgtgccttccttgaccctggaaggtgccactcccactgtcctttcctaataaaatgaggaaattgcatcgcattgtctgagtaggtgtcattctattctggggggtggggtggggcaggacagcaagggggaggattgggaagacaatagcaggcatgctggggatgcggtgggctctatggcttctgaggcggaaagaaccagctggggctctagggggtatccccacgcgccctgtagcggcgcattaagcgcggcgggtgtggtggttacgcgcagcgtgaccgctacacttgccagcgccctagcgcccgctcctttcgctttcttcccttcctttctcgccacgttcgccggctttccccgtcaagctctaaatcgggggctccctttagggttccgatttagtgctttacggcacctcgaccccaaaaaacttgattagggtgatggttcacgtagtgggccatcgccctgatagacggtttttcgccctttgacgttggagtccacgttctttaatagtggactcttgttccaaactggaacaacactcaaccctatctcggtctattcttttgatttataagggattttgccgatttcggcctattggttaaaaaatgagctgatttaacaaaaatttaacgcgaattaattctgtggaatgtgtgtcagttagggtgtggaaagtccccaggctccccagcaggcagaagtatgcaaagcatgcatctcaattagtcagcaaccaggtgtggaaagtccccaggctccccagcaggcagaagtatgcaaagcatgcatctcaattagtcagcaaccatagtcccgcccctaactccgcccatcccgcccctaactccgcccagttccgcccattctccgccccatggctgactaattttttttatttatgcagaggccgaggccgcctctgcctctgagctattccagaagtagtgaggaggcttttttggaggcctaggcttttgcaaaaagctcccgggagcttgtatatccattttcggatctgatcaagagacaggatgaggatcgtttcgcatgattgaacaagatggattgcacgcaggttctccggccgcttgggtggagaggctattcggctatgactgggcacaacagacaatcggctgctctgatgccgccgtgttccggctgtcagcgcaggggcgcccggttctttttgtcaagaccgacctgtccggtgccctgaatgaactgcaggacgaggcagcgcggctatcgtggctggccacgacgggcgttccttgcgcagctgtgctcgacgttgtcactgaagcgggaagggactggctgctattgggcgaagtgccggggcaggatctcctgtcatctcaccttgctcctgccgagaaagtatccatcatggctgatgcaatgcggcggctgcatacgcttgatccggctacctgcccattcgaccaccaagcgaaacatcgcatcgagcgagcacgtactcggatggaagccggtcttgtcgatcaggatgatctggacgaagagcatcaggggctcgcgccagccgaactgttcgccaggctcaaggcgcgcatgcccgacggcgaggatctcgtcgtgacccatggcgatgcctgcttgccgaatatcatggtggaaaatggccgcttttctggattcatcgactgtggccggctgggtgtggcggaccgctatcaggacatagcgttggctacccgtgatattgctgaagagcttggcggcgaatgggctgaccgcttcctcgtgctttacggtatcgccgctcccgattcgcagcgcatcgccttctatcgccttcttgacgagttcttctgagcgggactctggggttcgaaatgaccgaccaagcgacgcccaacctgccatcacgagatttcgattccaccgccgccttctatgaaaggttgggcttcggaatcgttttccgggacgccggctggatgatcctccagcgcggggatctcatgctggagttcttcgcccaccccaacttgtttattgcagcttataatggttacaaataaagcaatagcatcacaaatttcacaaataaagcatttttttcactgcattctagttgtggtttgtccaaactcatcaatgtatcttatcatgtctgtataccgtcgacctctagctagagcttggcgtaatcatggtcatagctgtttcctgtgtgaaattgttatccgctcacaattccacacaacatacgagccggaagcataaagtgtaaagcctggggtgcctaatgagtgagctaactcacattaattgcgttgcgctcactgcccgctttccagtcgggaaacctgtcgtgccagctgcattaatgaatcggccaacgcgcggggagaggcggtttgcgtattgggcgctcttccgcttcctcgctcactgactcgctgcgctcggtcgttcggctgcggcgagcggtatcagctcactcaaaggcggtaatacggttatccacagaatcaggggataacgcaggaaagaacatgtgagcaaaaggccagcaaaaggccaggaaccgtaaaaaggccgcgttgctggcgtttttccataggctccgcccccctgacgagcatcacaaaaatcgacgctcaagtcagaggtggcgaaacccgacaggactataaagataccaggcgtttccccctggaagctccctcgtgcgctctcctgttccgaccctgccgcttaccggatacctgtccgcctttctcccttcgggaagcgtggcgctttctcatagctcacgctgtaggtatctcagttcggtgtaggtcgttcgctccaagctgggctgtgtgcacgaaccccccgttcagcccgaccgctgcgccttatccggtaactatcgtcttgagtccaacccggtaagacacgacttatcgccactggcagcagccactggtaacaggattagcagagcgaggtatgtaggcggtgctacagagttcttgaagtggtggcctaactacggctacactagaagaacagtatttggtatctgcgctctgctgaagccagttaccttcggaaaaagagttggtagctcttgatccggcaaacaaaccaccgctggtagcggtttttttgtttgcaagcagcagattacgcgcagaaaaaaaggatctcaagaagatcctttgatcttttctacggggtctgacgctcagtggaacgaaaactcacgttaagggattttggtcatgagattatcaaaaaggatcttcacctagatccttttaaattaaaaatgaagttttaaatcaatctaaagtatatatgagtaaacttggtctgacagttaccaatgcttaatcagtgaggcacctatctcagcgatctgtctatttcgttcatccatagttgcctgactccccgtcgtgtagataactacgatacgggagggcttaccatctggccccagtgctgcaatgataccgcgagacccacgctcaccggctccagatttatcagcaataaaccagccagccggaagggccgagcgcagaagtggtcctgcaactttatccgcctccatccagtctattaattgttgccgggaagctagagtaagtagttcgccagttaatagtttgcgcaacgttgttgccattgctacaggcatcgtggtgtcacgctcgtcgtttggtatggcttcattcagctccggttcccaacgatcaaggcgagttacatgatcccccatgttgtgcaaaaaagcggttagctccttcggtcctccgatcgttgtcagaagtaagttggccgcagtgttatcactcatggttatggcagcactgcataattctcttactgtcatgccatccgtaagatgcttttctgtgactggtgagtactcaaccaagtcattctgagaatagtgtatgcggcgaccgagttgctcttgcccggcgtcaatacgggataataccgcgccacatagcagaactttaaaagtgctcatcattggaaaacgttcttcggggcgaaaactctcaaggatcttaccgctgttgagatccagttcgatgtaacccactcgtgcacccaactgatcttcagcatcttttactttcaccagcgtttctgggtgagcaaaaacaggaaggcaaaatgccgcaaaaaagggaataagggcgacacggaaatgttgaatactcatactcttcctttttcaatattattgaagcatttatcagggttattgtctcatgagcggatacatatttgaatgtatttagaaaaataaacaaataggggttccgcgcacatttccccgaaaagtgccacctgacgtc

SEQ ID NO: 163 - DNA, 4006 bp, Artificial Sequence
  pCI mammalian expression vector backbone
tcaatattggccattagccatattattcattggttatatagcataaatcaatattggctattggccattgcatacgttgtatctatatcataatatgtacatttatattggctcatgtccaatatgaccgccatgttggcattgattattgactagttattaatagtaatcaattacggggtcattagttcatagcccatatatggagttccgcgttacataacttacggtaaatggcccgcctggctgaccgcccaacgacccccgcccattgacgtcaataatgacgtatgttcccatagtaacgccaatagggactttccattgacgtcaatgggtggagtatttacggtaaactgcccacttggcagtacatcaagtgtatcatatgccaagtccgccccctattgacgtcaatgacggtaaatggcccgcctggcattatgcccagtacatgaccttacgggactttcctacttggcagtacatctacgtattagtcatcgctattaccatggtgatgcggttttggcagtacaccaatgggcgtggatagcggtttgactcacggggatttccaagtctccaccccattgacgtcaatgggagtttgttttggcaccaaaatcaacgggactttccaaaatgtcgtaataaccccgccccgttgacgcaaatgggcggtaggcgtgtacggtgggaggtctatataagcagagctcgtttagtgaaccgtcagatcactagaagctttattgcggtagtttatcacagttaaattgctaacgcagtcagtgcttctgacacaacagtctcgaacttaagctgcagaagttggtcgtgaggcactgggcaggtaagtatcaaggttacaagacaggtttaaggagaccaatagaaactgggcttgtcgagacagagaagactcttgcgtttctgataggcacctattggtcttactgacatccactttgcctttctctccacaggtgtccactcccagttcaattacagctcttaaggctagagtacttaatacgactcactataggctagcctcgagaattcacgcgtggtacctctagagtcgacccgggcggccgcttcgagcagacatgataagatacattgatgagtttggacaaaccacaactagaatgcagtgaaaaaaatgctttatttgtgaaatttgtgatgctattgctttatttgtaaccattataagctgcaataaacaagttaacaacaacaattgcattcattttatgtttcaggttcagggggagatgtgggaggttttttaaagcaagtaaaacctctacaaatgtggtaaaatcgataaggatccgggctggcgtaatagcgaagaggcccgcaccgatcgcccttcccaacagttgcgcagcctgaatggcgaatggacgcgccctgtagcggcgcattaagcgcggcgggtgtggtggttacgcgcagcgtgaccgctacacttgccagcgccctagcgcccgctcctttcgctttcttcccttcctttctcgccacgttcgccggctttccccgtcaagctctaaatcgggggctccctttagggttccgatttagtgctttacggcacctcgaccccaaaaaacttgattagggtgatggttcacgtagtgggccatcgccctgatagacggtttttcgccctttgacgttggagtccacgttctttaatagtggactcttgttccaaactggaacaacactcaaccctatctcggtctattcttttgatttataagggattttgccgatttcggcctattggttaaaaaatgagctgatttaacaaaaatttaacgcgaattttaacaaaatattaacgcttacaatttcctgatgcggtattttctccttacgcatctgtgcggtatttcacaccgcatatggtgcactctcagtacaatctgctctgatgccgcatagttaagccagccccgacacccgccaacacccgctgacgcgccctgacgggcttgtctgctcccggcatccgcttacagacaagctgtgaccgtctccgggagctgcatgtgtcagaggttttcaccgtcatcaccgaaacgcgcgagacgaaagggcctcgtgatacgcctatttttataggttaatgtcatgataataatggtttcttagacgtcaggtggcacttttcggggaaatgtgcgcggaacccctatttgtttatttttctaaatacattcaaatatgtatccgctcatgagacaataaccctgataaatgcttcaataatattgaaaaaggaagagtatgagtattcaacatttccgtgtcgcccttattcccttttttgcggcattttgccttcctgtttttgctcacccagaaacgctggtgaaagtaaaagatgctgaagatcagttgggtgcacgagtgggttacatcgaactggatctcaacagcggtaagatccttgagagttttcgccccgaagaacgttttccaatgatgagcacttttaaagttctgctatgtggcgcggtattatcccgtattgacgccgggcaagagcaactcggtcgccgcatacactattctcagaatgacttggttgagtactcaccagtcacagaaaagcatcttacggatggcatgacagtaagagaattatgcagtgctgccataaccatgagtgataacactgcggccaacttacttctgacaacgatcggaggaccgaaggagctaaccgcttttttgcacaacatgggggatcatgtaactcgccttgatcgttgggaaccggagctgaatgaagccataccaaacgacgagcgtgacaccacgatgcctgtagcaatggcaacaacgttgcgcaaactattaactggcgaactacttactctagcttcccggcaacaattaatagactggatggaggcggataaagttgcaggaccacttctgcgctcggcccttccggctggctggtttattgctgataaatctggagccggtgagcgtgggtctcgcggtatcattgcagcactggggccagatggtaagccctcccgtatcgtagttatctacacgacggggagtcaggcaactatggatgaacgaaatagacagatcgctgagataggtgcctcactgattaagcattggtaactgtcagaccaagtttactcatatatactttagattgatttaaaacttcatttttaatttaaaaggatctaggtgaagatcctttttgataatctcatgaccaaaatcccttaacgtgagttttcgttccactgagcgtcagaccccgtagaaaagatcaaaggatcttcttgagatcctttttttctgcgcgtaatctgctgcttgcaaacaaaaaaaccaccgctaccagcggtggtttgtttgccggatcaagagctaccaactctttttccgaaggtaactggcttcagcagagcgcagataccaaatactgttcttctagtgtagccgtagttaggccaccacttcaagaactctgtagcaccgcctacatacctcgctctgctaatcctgttaccagtggctgctgccagtggcgataagtcgtgtcttaccgggttggactcaagacgatagttaccggataaggcgcagcggtcgggctgaacggggggttcgtgcacacagcccagcttggagcgaacgacctacaccgaactgagatacctacagcgtgagctatgagaaagcgccacgcttcccgaagggagaaaggcggacaggtatccggtaagcggcagggtcggaacaggagagcgcacgagggagcttccagggggaaacgcctggtatctttatagtcctgtcgggtttcgccacctctgacttgagcgtcgatttttgtgatgctcgtcaggggggcggagcctatggaaaaacgccagcaacgcggcctttttacggttcctggccttttgctggccttttgctcacatggctcgacagatct

SEQ ID NO: 164 - DNA, 3632 bp, Artificial Sequence
  pSI vector backbone
gcgcagcaccatggcctgaaataacctctgaaagaggaacttggttaggtaccttctgaggcggaaagaaccagctgtggaatgtgtgtcagttagggtgtggaaagtccccaggctccccagcaggcagaagtatgcaaagcatgcatctcaattagtcagcaaccaggtgtggaaagtccccaggctccccagcaggcagaagtatgcaaagcatgcatctcaattagtcagcaaccatagtcccgcccctaactccgcccatcccgcccctaactccgcccagttccgcccattctccgccccatggctgactaattttttttatttatgcagaggccgaggccgcctcggcctctgagctattccagaagtagtgaggaggcttttttggaggcctaggcttttgcaaaaagcttgattcttctgacacaacagtctcgaacttaagctgcagaagttggtcgtgaggcactgggcaggtaagtatcaaggttacaagacaggtttaaggagaccaatagaaactgggcttgtcgagacagagaagactcttgcgtttctgataggcacctattggtcttactgacatccactttgcctttctctccacaggtgtccactcccagttcaattacagctcttaaggctagagtacttaatacgactcactataggctagcctcgagaattcacgcgtggtacctctagagtcgacccgggcggccgcttcgagcagacatgataagatacattgatgagtttggacaaaccacaactagaatgcagtgaaaaaaatgctttatttgtgaaatttgtgatgctattgctttatttgtaaccattataagctgcaataaacaagttaacaacaacaattgcattcattttatgtttcaggttcagggggaggtgtgggaggttttttaaagcaagtaaaacctctacaaatgtggtaaaatcgataaggatccgggctggcgtaatagcgaagaggcccgcaccgatcgcccttcccaacagttgcgcagcctgaatggcgaatggacgcgccctgtagcggcgcattaagcgcggcgggtgtggtggttacgcgcagcgtgaccgctacacttgccagcgccctagcgcccgctcctttcgctttcttcccttcctttctcgccacgttcgccggctttccccgtcaagctctaaatcgggggctccctttagggttccgatttagtgctttacggcacctcgaccccaaaaaacttgattagggtgatggttcacgtagtgggccatcgccctgatagacggtttttcgccctttgacgttggagtccacgttctttaatagtggactcttgttccaaactggaacaacactcaaccctatctcggtctattcttttgatttataagggattttgccgatttcggcctattggttaaaaaatgagctgatttaacaaaaatttaacgcgaattttaacaaaatattaacgcttacaatttcctgatgcggtattttctccttacgcatctgtgcggtatttcacaccgcatatggtgcactctcagtacaatctgctctgatgccgcatagttaagccagccccgacacccgccaacacccgctgacgcgccctgacgggcttgtctgctcccggcatccgcttacagacaagctgtgaccgtctccgggagctgcatgtgtcagaggttttcaccgtcatcaccgaaacgcgcgagacgaaagggcctcgtgatacgcctatttttataggttaatgtcatgataataatggtttcttagacgtcaggtggcacttttcggggaaatgtgcgcggaacccctatttgtttatttttctaaatacattcaaatatgtatccgctcatgagacaataaccctgataaatgcttcaataatattgaaaaaggaagagtatgagtattcaacatttccgtgtcgcccttattcccttttttgcggcattttgccttcctgtttttgctcacccagaaacgctggtgaaagtaaaagatgctgaagatcagttgggtgcacgagtgggttacatcgaactggatctcaacagcggtaagatccttgagagttttcgccccgaagaacgttttccaatgatgagcacttttaaagttctgctatgtggcgcggtattatcccgtattgacgccgggcaagagcaactcggtcgccgcatacactattctcagaatgacttggttgagtactcaccagtcacagaaaagcatcttacggatggcatgacagtaagagaattatgcagtgctgccataaccatgagtgataacactgcggccaacttacttctgacaacgatcggaggaccgaaggagctaaccgcttttttgcacaacatgggggatcatgtaactcgccttgatcgttgggaaccggagctgaatgaagccataccaaacgacgagcgtgacaccacgatgcctgtagcaatggcaacaacgttgcgcaaactattaactggcgaactacttactctagcttcccggcaacaattaatagactggatggaggcggataaagttgcaggaccacttctgcgctcggcccttccggctggctggtttattgctgataaatctggagccggtgagcgtgggtctcgcggtatcattgcagcactggggccagatggtaagccctcccgtatcgtagttatctacacgacggggagtcaggcaactatggatgaacgaaatagacagatcgctgagataggtgcctcactgattaagcattggtaactgtcagaccaagtttactcatatatactttagattgatttaaaacttcatttttaatttaaaaggatctaggtgaagatcctttttgataatctcatgaccaaaatcccttaacgtgagttttcgttccactgagcgtcagaccccgtagaaaagatcaaaggatcttcttgagatcctttttttctgcgcgtaatctgctgcttgcaaacaaaaaaaccaccgctaccagcggtggtttgtttgccggatcaagagctaccaactctttttccgaaggtaactggcttcagcagagcgcagataccaaatactgttcttctagtgtagccgtagttaggccaccacttcaagaactctgtagcaccgcctacatacctcgctctgctaatcctgttaccagtggctgctgccagtggcgataagtcgtgtcttaccgggttggactcaagacgatagttaccggataaggcgcagcggtcgggctgaacggggggttcgtgcacacagcccagcttggagcgaacgacctacaccgaactgagatacctacagcgtgagctatgagaaagcgccacgcttcccgaagggagaaaggcggacaggtatccggtaagcggcagggtcggaacaggagagcgcacgagggagcttccagggggaaacgcctggtatctttatagtcctgtcgggtttcgccacctctgacttgagcgtcgatttttgtgatgctcgtcaggggggcggagcctatggaaaaacgccagcaacgcggcctttttacggttcctggccttttgctggccttttgctcacatggctcgacagatct

SEQ ID NO: 165 - DNA, 3515 bp, Artificial Sequence
  pZeoSV2(+) backbone
ggatcgatccggctgtggaatgtgtgtcagttagggtgtggaaagtccccaggctccccagcaggcagaagtatgcaaagcatgcatctcaattagtcagcaaccaggtgtggaaagtccccaggctccccagcaggcagaagtatgcaaagcatgcatctcaattagtcagcaaccatagtcccgcccctaactccgcccatcccgcccctaactccgcccagttccgcccattctccgccccatggctgactaattttttttatttatgcagaggccgaggccgcctcggcctctgagctattccagaagtagtgaggaggcttttttggaggcctaggcttttgcaaaaagctctctggctaactagagaacccactgcttactggcttatcgaaattaatacgactcactatagggagacccaagctggctagcgtttaaacttaagcttggtaccgagctcggatccactagtccagtgtggtggaattctgcagatatccagcacagtggcggccgctcgagtctagagggcccgtttaaacccgctgatcagcctcgactgtgccttctagttgccagccatctgttgtttgcccctcccccgtgccttccttgaccctggaaggtgccactcccactgtcctttcctaataaaatgaggaaattgcatcgcattgtctgagtaggtgtcattctattctggggggtggggtggggcaggacagcaagggggaggattgggaagacaatagcaggcatgctggggatgcggtgggctctatggcttctgaggcggaaagaaccagcatgtgagcaaaaggccagcaaaaggccaggaaccgtaaaaaggccgcgttgctggcgtttttccataggctccgcccccctgacgagcatcacaaaaatcgacgctcaagtcagaggtggcgaaacccgacaggactataaagataccaggcgtttccccctggaagctccctcgtgcgctctcctgttccgaccctgccgcttaccggatacctgtccgcctttctcccttcgggaagcgtggcgctttctcatagctcacgctgtaggtatctcagttcggtgtaggtcgttcgctccaagctgggctgtgtgcacgaaccccccgttcagcccgaccgctgcgccttatccggtaactatcgtcttgagtccaacccggtaagacacgacttatcgccactggcagcagccactggtaacaggattagcagagcgaggtatgtaggcggtgctacagagttcttgaagtggtggcctaactacggctacactagaagaacagtatttggtatctgcgctctgctgaagccagttaccttcggaaaaagagttggtagctcttgatccggcaaacaaaccaccgctggtagcggtggtttttttgtttgcaagcagcagattacgcgcagaaaaaaaggatctcaagaagatcctttgatcttttctacggggtctgacgctcagtggaacgaaaactcacgttaagggattttggtcatgacattaacctataaaaataggcgtatcacgaggccctttcgtctcgcgcgtttcggtgatgacggtgaaaacctctgacacatgcagctcccggagacggtcacagcttgtctgtaagcggatgccgggagcagacaagcccgtcagggcgcgtcagcgggtgttggcgggtgtcggggctggcttaactatgcggcatcagagcagattgtactgagagtgcaccatatgcggtgtgaaataccgcacagatgcgtaaggagaaaataccgcatcaggacgcgccctgtagcggcgcattaagcgcggcgggtgtggtggttacgcgcagcgtgaccgctacacttgccagcgccctagcgcccgctcctttcgctttcttcccttcctttctcgccacgttcgccggctttccccgtcaagctctaaatcgggggctccctttagggttccgatttagtgctttacggcacctcgaccccaaaaaacttgattagggtgatggttcacgtagtgggccatcgccctgatagacggtttttcgccctttgacgttggagtccacgttctttaatagtggactcttgttccaaactggaacaacactcaaccctatctcggtctattcttttgatttataagggattttgccgatttcggcctattggttaaaaaatgagctgatttaacaaaaatttaacgcgaattttaacaaaatattaacgcttacaatttccattcgccattcaggctgaactagatctagagtccgttacataacttacggtaaatggcccgcctggctgaccgcccaacgacccccgcccattgacgtcaataatgacgtatgttcccatagtaacgccaatagggactttccattgacgtcaatgggtggagtatttacggtaaactgcccacttggcagtacatcaagtgtatcatatgccaagtacgccccctattgacgtcaatgacggtaaatggcccgcctggcattatgcccagtacatgaccttatgggactttcctacttggcagtacatctacgtattagtcatcgctattaccatggtgatgcggttttggcagtacatcaatgggcgtggatagcggtttgactcacggggatttccaagtctccaccccattgacgtcaatgggagtttgttttggcaccaaaatcaacgggactttccaaaatgtcgtaacaactccgccccattgacgcaaatgggcggtaggcgtgtacggtgggaggtctatataagcagagctcgtttagtgaaccgtcagatcgcctggagacgccatccacgctgttttgacctccatagaagacaccgggaccgatccagcctccgcggccgggaacggtgcattggaacggaccgtgttgacaattaatcatcggcatagtatatcggcatagtataatacgacaaggtgaggaactaaaccatggccaagttgaccagtgccgttccggtgctcaccgcgcgcgacgtcgccggagcggtcgagttctggaccgaccggctcgggttctcccgggacttcgtggaggacgacttcgccggtgtggtccgggacgacgtgaccctgttcatcagcgcggtccaggaccaggtggtgccggacaacaccctggcctgggtgtgggtgcgcggcctggacgagctgtacgccgagtggtcggaggtcgtgtccacgaacttccgggacgcctccgggccggccatgaccgagatcggcgagcagccgtgggggcgggagttcgccctgcgcgacccggccggcaactgcgtgcacttcgtggccgaggagcaggactgacactcgacctcgaaacttgtttattgcagcttataatggttacaaataaagcaatagcatcacaaatttcacaaataaagcatttttttcactgcattctagttgtggtttgtccaaactcatcaatgtatcttatcatgtct

SEQ ID NO: 166 - DNA, 4239 bp, Artificial Sequence
  phCMV1 backbone
tagttattaatagtaatcaattacggggtcattagttcatagcccatatatggagttccgcgttacataacttacggtaaatggcccgcctggctgaccgcccaacgacccccgcccattgacgtcaataatgacgtatgttcccatagtaacgccaatagggactttccattgacgtcaatgggtggagtatttacggtaaactgcccacttggcagtacatcaagtgtatcatatgccaagtacgccccctattgacgtcaatgacggtaaatggcccgcctggcattatgcccagtacatgaccttatgggactttcctacttggcagtacatctacgtattagtcatcgctattaccatggtgatgcggttttggcagtacatcaatgggcgtggatagcggtttgactcacggggatttccaagtctccaccccattgacgtcaatgggagtttgttttggcaccaaaatcaacgggactttccaaaatgtcgtaacaactccgccccattgacgcaaatgggcggtaggcgtgtacggtgggaggtctatataagcagagctcgtttagtgaaccgtcagatcgcctggagacgccatccacgctgttttgacctccatagaagacaccgggaccgatccagcctccgcggccgggaacggtgcattggaacgcggattccccgtgccaagagtgacgtaagtaccgcctatagactctataggcacacccctttggctcttatgcatgaattaatacgactcactatagggagacagactgttcctttcctgggtcttttctgcaggcaccgtcgtcgacttaacagatctcgagctcaagcttcgaattctgcagtcgacggtaccgcgggcccgggatccaccgggtacaagtaaagcggccgcgactctagatcataatcagccataccacatttgtagaggttttacttgctttaaaaaacctcccacacctccccctgaacctgaaacataaaatgaatgcaattgttgttgttaacttgtttattgcagcttataatggttacaaataaagcaatagcatcacaaatttcacaaataaagcatttttttcactgcattctagttgtggtttgtccaaactcatcaatgtatcttaaggcgtaaattgtaagcgttaatattttgttaaaattcgcgttaaatttttgttaaatcagctcattttttaaccaataggccgaaatcggcaaaatcccttataaatcaaaagaatagaccgagatagggttgagtgttgttccagtttggaacaagagtccactattaaagaacgtggactccaacgtcaaagggcgaaaaaccgtctatcagggcgatggcccactacgtgaaccatcaccctaatcaagttttttggggtcgaggtgccgtaaagcactaaatcggaaccctaaagggagcccccgatttagagcttgacggggaaagccggcgaacgtggcgagaaaggaagggaagaaagcgaaaggagcgggcgctagggcgctggcaagtgtagcggtcacgctgcgcgtaaccaccacacccgccgcgcttaatgcgccgctacagggcgcgtcaggtggcacttttcggggaaatgtgcgcggaacccctatttgtttatttttctaaatacattcaaatatgtatccgctcatgagacaataaccctgataaatgcttcaataatattgaaaaaggaagagtcctgaggcggaaagaaccagctgtggaatgtgtgtcagttagggtgtggaaagtccccaggctccccagcaggcagaagtatgcaaagcatgcatctcaattagtcagcaaccaggtgtggaaagtccccaggctccccagcaggcagaagtatgcaaagcatgcatctcaattagtcagcaaccatagtcccgcccctaactccgcccatcccgcccctaactccgcccagttccgcccattctccgccccatggctgactaattttttttatttatgcagaggccgaggccgcctcggcctctgagctattccagaagtagtgaggaggcttttttggaggcctaggcttttgcaaagatcgatcaagagacaggatgaggatcgtttcgcatgattgaacaagatggattgcacgcaggttctccggccgcttgggtggagaggctattcggctatgactgggcacaacagacaatcggctgctctgatgccgccgtgttccggctgtcagcgcaggggcgcccggttctttttgtcaagaccgacctgtccggtgccctgaatgaactgcaagacgaggcagcgcggctatcgtggctggccacgacgggcgttccttgcgcagctgtgctcgacgttgtcactgaagcgggaagggactggctgctattgggcgaagtgccggggcaggatctcctgtcatctcaccttgctcctgccgagaaagtatccatcatggctgatgcaatgcggcggctgcatacgcttgatccggctacctgcccattcgaccaccaagcgaaacatcgcatcgagcgagcacgtactcggatggaagccggtcttgtcgatcaggatgatctggacgaagagcatcaggggctcgcgccagccgaactgttcgccaggctcaaggcgagcatgcccgacggcgaggatctcgtcgtgacccatggcgatgcctgcttgccgaatatcatggtggaaaatggccgcttttctggattcatcgactgtggccggctgggtgtggcggaccgctatcaggacatagcgttggctacccgtgatattgctgaagagcttggcggcgaatgggctgaccgcttcctcgtgctttacggtatcgccgctcccgattcgcagcgcatcgccttctatcgccttcttgacgagttcttctgagcgggactctggggttcgaaatgaccgaccaagcgacgcccaacctgccatcacgagatttcgattccaccgccgccttctatgaaaggttgggcttcggaatcgttttccgggacgccggctggatgatcctccagcgcggggatctcatgctggagttcttcgcccaccctagggggaggctaactgaaacacggaaggagacaataccggaaggaacccgcgctatgacggcaataaaaagacagaataaaacgcacggtgttgggtcgtttgttcataaacgcggggttcggtcccagggctggcactctgtcgataccccaccgagaccccattggggccaatacgcccgcgtttcttccttttccccaccccaccccccaagttcgggtgaaggcccagggctcgcagccaacgtcggggcggcaggccctgccatagcctcaggttactcatatatactttagattgatttaaaacttcatttttaatttaaaaggatctaggtgaagatcctttttgataatctcatgaccaaaatcccttaacgtgagttttcgttccactgagcgtcagaccccgtagaaaagatcaaaggatcttcttgagatcctttttttctgcgcgtaatctgctgcttgcaaacaaaaaaaccaccgctaccagcggtggtttgtttgccggatcaagagctaccaactctttttccgaaggtaactggcttcagcagagcgcagataccaaatactgtccttctagtgtagccgtagttaggccaccacttcaagaactctgtagcaccgcctacatacctcgctctgctaatcctgttaccagtggctgctgccagtggcgataagtcgtgtcttaccgggttggactcaagacgatagttaccggataaggcgcagcggtcgggctgaacggggggttcgtgcacacagcccagcttggagcgaacgacctacaccgaactgagatacctacagcgtgagctatgagaaagcgccacgcttcccgaagggagaaaggcggacaggtatccggtaagcggcagggtcggaacaggagagcgcacgagggagcttccagggggaaacgcctggtatctttatagtcctgtcgggtttcgccacctctgacttgagcgtcgatttttgtgatgctcgtcaggggggcggagcctatggaaaaacgccagcaacgcggcctttttacggttcctggccttttgctggccttttgctcacatgttctttcctgcgttatcccctgattctgtggataaccgtattaccgccatgcat

SEQ ID NO: 167 - DNA, 4930 bp, Artificial Sequence
  pTCP backbone
tagttattaatagtaatcaattacggggtcattagttcatagcccatatatggagttccgcgttacataacttacggtaaatggcccgcctggctgaccgcccaacgacccccgcccattgacgtcaataatgacgtatgttcccatagtaacgccaatagggactttccattgacgtcaatgggtggagtatttacggtaaactgcccacttggcagtacatcaagtgtatcatatgccaagtacgccccctattgacgtcaatgacggtaaatggcccgcctggcattatgcccagtacatgaccttatgggactttcctacttggcagtacatctacgtattagtcatcgctattaccatggtgatgcggttttggcagtacatcaatgggcgtggatagcggtttgactcacggggatttccaagtctccaccccattgacgtcaatgggagtttgttttggcaccaaaatcaacgggactttccaaaatgtcgtaacaactccgccccattgacgcaaatgggcggtaggcgtgtacggtgggaggtctatataagcagagctggtttagtgaaccgtggatcccgtcgcttaccgattcagaatggttgatatccgccattctgaatcggtaagcgacgaagcttaataaaggatcttttattttcattggatctgtgtgttggttttttgtgtgcggccgccctcgactgtgccttctagaagacaatagcaggcatgctggggatgcggtgggctctatggcttctgaggcggaaagaaccagctggggctctagggggtatccccacgcgccctgtagcggcgcattaagcgcggcgggtgtggtggttacgcgcagcgtgaccgctacacttgccagcgccctagcgcccgctcctttcgctttcttcccttcctttctcgccacgttcgccggctttccccgtcaagctctaaatcgggggctccctttagggttccgatttagtgctttacggcacctcgaccccaaaaaacttgattagggtgatggttcacgtagtgggccatcgccctgatagacggtttttcgccctttgacgttggagtccacgttctttaatagtggactcttgttccaaactggaacaacactcaaccctatctcggtctattcttttgatttataagggattttgccgatttcggcctattggttaaaaaatgagctgatttaacaaaaatttaacgcgaattaattctgtggaatgtgtgtcagttagggtgtggaaagtccccaggctccccagcaggcagaagtatgcaaagcatgcatctcaattagtcagcaaccaggtgtggaaagtccccaggctccccagcaggcagaagtatgcaaagcatgcatctcaattagtcagcaaccatagtcccgcccctaactccgcccatcccgcccctaactccgcccagttccgcccattctccgccccatggctgactaattttttttatttatgcagaggccgaggccgcctctgcctctgagctattccagaagtagtgaggaggcttttttggaggcctaggcttttgcaaaaagctcccgggatgaccgagtacaagcccacggtgcgcctcgccacccgcgacgacgtcccgcgggccgtacgcaccctcgccgccgcgttcgccgactaccccgccacgcgccacaccgtcgacccggaccgccacatcgagcgggtcaccgagctgcaagaactcttcctcacgcgcgtcgggctcgacatcggcaaggtgtgggtcgcggacgacggcgccgcggtggcggtctggaccacgccggagagcgtcgaagcgggggcggtgttcgccgagatcggcccgcgcatggccgagttgagcggttcccggctggccgcgcagcaacagatggaaggcctcctggcgccgcaccggcccaaggagcccgcgtggttcctggccaccgtcggcgtctcgcccgaccaccagggcaagggtctgggcagcgccgtcgtgctccccggagtggaggcggccgagcgcgccggggtgcccgccttcctggagacctccgcgccccgcaacctccccttctacgagcggctcggcttcaccgtcaccgccgacgtcgaggtgcccgaaggaccgcgcacctggtgcatgacccgcaagcccggtgcctgattcgaatgaccgaccaagcgacgcccaacctgccatcacgagatttcgattccaccgccgccttctatgaaaggttgggcttcggaatcgttttccgggacgccggctggatgatcctccagcgcggggatctcatgctggagttcttcgcccaccccaacttgtttattgcagcttataatggttacaaataaagcaatagcatcacaaatttcacaaataaagcatttttttcactgcattctagttgtggtttgtccaaactcatcaatgtatcttatcatgtctgtataccgtcgacctctagctagagcttggcgtaatcatggtcatagctgtttcctgtgtgaaattgttatccgctcacaattccacacaacatacgagccggaagcataaagtgtaaagcctggggtgcctaatgagtgagctaactcacattaattgcgttgcgctcactgcccgctttccagtcgggaaacctgtcgtgccagctgcattaatgaatcggccaacgcgcggggagaggcggtttgcgtattgggcgctcttccgcttcctcgctcactgactcgctgcgctcggtcgttcggctgcggcgagcggtatcagctcactcaaaggcggtaatacggttatccacagaatcaggggataacgcaggaaagaacatgtgagcaaaaggccagcaaaaggccaggaaccgtaaaaaggccgcgttgctggcgtttttccataggctccgcccccctgacgagcatcacaaaaatcgacgctcaagtcagaggtggcgaaacccgacaggactataaagataccaggcgtttccccctggaagctccctcgtgcgctctcctgttccgaccctgccgcttaccggatacctgtccgcctttctcccttcgggaagcgtggcgctttctcatagctcacgctgtaggtatctcagttcggtgtaggtcgttcgctccaagctgggctgtgtgcacgaaccccccgttcagcccgaccgctgcgccttatccggtaactatcgtcttgagtccaacccggtaagacacgacttatcgccactggcagcagccactggtaacaggattagcagagcgaggtatgtaggcggtgctacagagttcttgaagtggtggcctaactacggctacactagaagaacagtatttggtatctgcgctctgctgaagccagttaccttcggaaaaagagttggtagctcttgatccggcaaacaaaccaccgctggtagcggtttttttgtttgcaagcagcagattacgcgcagaaaaaaaggatctcaagaagatcctttgatcttttctacggggtctgacgctcagtggaacgaaaactcacgttaagggattttggtcatgagattatcaaaaaggatcttcacctagatccttttaaattaaaaatgaagttttaaatcaatctaaagtatatatgagtaaacttggtctgacagttaccaatgcttaatcagtgaggcacctatctcagcgatctgtctatttcgttcatccatagttgcctgactccccgtcgtgtagataactacgatacgggagggcttaccatctggccccagtgctgcaatgataccgcgagacccacgctcaccggctccagatttatcagcaataaaccagccagccggaagggccgagcgcagaagtggtcctgcaactttatccgcctccatccagtctattaattgttgccgggaagctagagtaagtagttcgccagttaatagtttgcgcaacgttgttgccattgctacaggcatcgtggtgtcacgctcgtcgtttggtatggcttcattcagctccggttcccaacgatcaaggcgagttacatgatcccccatgttgtgcaaaaaagcggttagctccttcggtcctccgatcgttgtcagaagtaagttggccgcagtgttatcactcatggttatggcagcactgcataattctcttactgtcatgccatccgtaagatgcttttctgtgactggtgagtactcaaccaagtcattctgagaatagtgtatgcggcgaccgagttgctcttgcccggcgtcaatacgggataataccgcgccacatagcagaactttaaaagtgctcatcattggaaaacgttcttcggggcgaaaactctcaaggatcttaccgctgttgagatccagttcgatgtaacccactcgtgcacccaactgatcttcagcatcttttactttcaccagcgtttctgggtgagcaaaaacaggaaggcaaaatgccgcaaaaaagggaataagggcgacacggaaatgttgaatactcatactcttcctttttcaatattattgaagcatttatcagggttattgtctcatgagcggatacatatttgaatgtatttagaaaaataaacaaataggggttccgcgcacatttccccgaaaagtgccacctgacgtcgacggatcgggagatctcccgatcccctatggtgcactctcagtacaatctgctctgatgccgcatagttaagccagtatctgctccctgcttgtgtgttggaggtcgctgagtagtgcgcgagcaaaatttaagctacaacaaggcaaggcttgaccgacaattgcatgaagaatctgcttagggttaggcgttttgcgctgcttcgcgatgtacgggccagatatacgcgttgacattgattattgac

SEQ ID NO: 168 - DNA, 6105 bp, Artificial Sequence
  pIRES backbone
tcaatattggccattagccatattattcattggttatatagcataaatcaatattggctattggccattgcatacgttgtatctatatcataatatgtacatttatattggctcatgtccaatatgaccgccatgttggcattgattattgactagttattaatagtaatcaattacggggtcattagttcatagcccatatatggagttccgcgttacataacttacggtaaatggcccgcctggctgaccgcccaacgacccccgcccattgacgtcaataatgacgtatgttcccatagtaacgccaatagggactttccattgacgtcaatgggtggagtatttacggtaaactgcccacttggcagtacatcaagtgtatcatatgccaagtccgccccctattgacgtcaatgacggtaaatggcccgcctggcattatgcccagtacatgaccttacgggactttcctacttggcagtacatctacgtattagtcatcgctattaccatggtgatgcggttttggcagtacaccaatgggcgtggatagcggtttgactcacggggatttccaagtctccaccccattgacgtcaatgggagtttgttttggcaccaaaatcaacgggactttccaaaatgtcgtaacaactgcgatcgcccgccccgttgacgcaaatgggcggtaggcgtgtacggtgggaggtctatataagcagagctcgtttagtgaaccgtcagatcactagaagctttattgcggtagtttatcacagttaaattgctaacgcagtcagtgcttctgacacaacagtctcgaacttaagctgcagtgactctcttaaggtagccttgcagaagttggtcgtgaggcactgggcaggtaagtatcaaggttacaagacaggtttaaggagaccaatagaaactgggcttgtcgagacagagaagactcttgcgtttctgataggcacctattggtcttactgacatccactttgcctttctctccacaggtgtccactcccagttcaattacagctcttaaggctagagtacttaatacgactcactataggctagcctcgagaattcacgcgtcgagcatgcatctagggcggccaattccgcccctctcccccccccccctctccctcccccccccctaacgttactggccgaagccgcttggaataaggccggtgtgcgtttgtctatatgttattttccaccatattgccgtcttttggcaatgtgagggcccggaaacctggccctgtcttcttgacgagcattcctaggggtctttcccctctcgccaaaggaatgcaaggtctgttgaatgtcgtgaaggaagcagttcctctggaagcttcttgaagacaaacaacgtctgtagcgaccctttgcaggcagcggaaccccccacctggcgacaggtgcctctgcggccaaaagccacgtgtataagatacacctgcaaaggcggcacaaccccagtgccacgttgtgagttggatagttgtggaaagagtcaaatggctctcctcaagcgtattcaacaaggggctgaaggatgcccagaaggtaccccattgtatgggatctgatctggggcctcggtgcacatgctttacatgtgtttagtcgaggttaaaaaaacgtctaggccccccgaaccacggggacgtggttttcctttgaaaaacacgatgataagcttgccacaacccgggatcctctagagtcgacccgggcggccgcttccctttagtgagggttaatgcttcgagcagacatgataagatacattgatgagtttggacaaaccacaactagaatgcagtgaaaaaaatgctttatttgtgaaatttgtgatgctattgctttatttgtaaccattataagctgcaataaacaagttaacaacaacaattgcattcattttatgtttcaggttcagggggagatgtgggaggttttttaaagcaagtaaaacctctacaaatgtggtaaaatccgataaggatcgatccgggctggcgtaatagcgaagaggcccgcaccgatcgcccttcccaacagttgcgcagcctgaatggcgaatggacgcgccctgtagcggcgcattaagcgcggcgggtgtggtggttacgcgcagcgtgaccgctacacttgccagcgccctagcgcccgctcctttcgctttcttcccttcctttctcgccacgttcgccggctttccccgtcaagctctaaatcgggggctccctttagggttccgatttagtgctttacggcacctcgaccccaaaaaacttgattagggtgatggttcacgtagtgggccatcgccctgatagacggtttttcgccctttgacgttggagtccacgttctttaatagtggactcttgttccaaactggaacaacactcaaccctatctcggtctattcttttgatttataagggattttgccgatttcggcctattggttaaaaaatgagctgatttaacaaaaatttaacgcgaattttaacaaaatattaacgcttacaatttcctgatgcggtattttctccttacgcatctgtgcggtatttcacaccgcatacgcggatctgcgcagcaccatggcctgaaataacctctgaaagaggaacttggttaggtaccttctgaggcggaaagaaccagctgtggaatgtgtgtcagttagggtgtggaaagtccccaggctccccagcaggcagaagtatgcaaagcatgcatctcaattagtcagcaaccaggtgtggaaagtccccaggctccccagcaggcagaagtatgcaaagcatgcatctcaattagtcagcaaccatagtcccgcccctaactccgcccatcccgcccctaactccgcccagttccgcccattctccgccccatggctgactaattttttttatttatgcagaggccgaggccgcctcggcctctgagctattccagaagtagtgaggaggcttttttggaggcctaggcttttgcaaaaagcttgattcttctgacacaacagtctcgaacttaaggctagagccaccatgattgaacaagatggattgcacgcaggttctccggccgcttgggtggagaggctattcggctatgactgggcacaacagacaatcggctgctctgatgccgccgtgttccggctgtcagcgcaggggcgcccggttctttttgtcaagaccgacctgtccggtgccctgaatgaactgcaggacgaggcagcgcggctatcgtggctggccacgacgggcgttccttgcgcagctgtgctcgacgttgtcactgaagcgggaagggactggctgctattgggcgaagtgccggggcaggatctcctgtcatctcaccttgctcctgccgagaaagtatccatcatggctgatgcaatgcggcggctgcatacgcttgatccggctacctgcccattcgaccaccaagcgaaacatcgcatcgagcgagcacgtactcggatggaagccggtcttgtcgatcaggatgatctggacgaagagcatcaggggctcgcgccagccgaactgttcgccaggctcaaggcgcgcatgcccgacggcgaggatctcgtcgtgacccatggcgatgcctgcttgccgaatatcatggtggaaaatggccgcttttctggattcatcgactgtggccggctgggtgtggcggaccgctatcaggacatagcgttggctacccgtgatattgctgaagagcttggcggcgaatgggctgaccgcttcctcgtgctttacggtatcgccgctcccgattcgcagcgcatcgccttctatcgccttcttgacgagttcttctgagcgggactctggggttcgaaatgaccgaccaagcgacgcccaacctgccatcacgatggccgcaataaaatatctttattttcattacatctgtgtgttggttttttgtgtgaatcgatagcgataaggatccgcgtatggtgcactctcagtacaatctgctctgatgccgcatagttaagccagccccgacacccgccaacacccgctgacgcgccctgacgggcttgtctgctcccggcatccgcttacagacaagctgtgaccgtctccgggagctgcatgtgtcagaggttttcaccgtcatcaccgaaacgcgcgagacgaaagggcctcgtgatacgcctatttttataggttaatgtcatgataataatggtttcttagacgtcaggtggcacttttcggggaaatgtgcgcggaacccctatttgtttatttttctaaatacattcaaatatgtatccgctcatgagacaataaccctgataaatgcttcaataatattgaaaaaggaagagtatgagtattcaacatttccgtgtcgcccttattcccttttttgcggcattttgccttcctgtttttgctcacccagaaacgctggtgaaagtaaaagatgctgaagatcagttgggtgcacgagtgggttacatcgaactggatctcaacagcggtaagatccttgagagttttcgccccgaagaacgttttccaatgatgagcacttttaaagttctgctatgtggcgcggtattatcccgtattgacgccgggcaagagcaactcggtcgccgcatacactattctcagaatgacttggttgagtactcaccagtcacagaaaagcatcttacggatggcatgacagtaagagaattatgcagtgctgccataaccatgagtgataacactgcggccaacttacttctgacaacgatcggaggaccgaaggagctaaccgcttttttgcacaacatgggggatcatgtaactcgccttgatcgttgggaaccggagctgaatgaagccataccaaacgacgagcgtgacaccacgatgcctgtagcaatggcaacaacgttgcgcaaactattaactggcgaactacttactctagcttcccggcaacaattaatagactggatggaggcggataaagttgcaggaccacttctgcgctcggcccttccggctggctggtttattgctgataaatctggagccggtgagcgtgggtctcgcggtatcattgcagcactggggccagatggtaagccctcccgtatcgtagttatctacacgacggggagtcaggcaactatggatgaacgaaatagacagatcgctgagataggtgcctcactgattaagcattggtaactgtcagaccaagtttactcatatatactttagattgatttaaaacttcatttttaatttaaaaggatctaggtgaagatcctttttgataatctcatgaccaaaatcccttaacgtgagttttcgttccactgagcgtcagaccccgtagaaaagatcaaaggatcttcttgagatcctttttttctgcgcgtaatctgctgcttgcaaacaaaaaaaccaccgctaccagcggtggtttgtttgccggatcaagagctaccaactctttttccgaaggtaactggcttcagcagagcgcagataccaaatactgttcttctagtgtagccgtagttaggccaccacttcaagaactctgtagcaccgcctacatacctcgctctgctaatcctgttaccagtggctgctgccagtggcgataagtcgtgtcttaccgggttggactcaagacgatagttaccggataaggcgcagcggtcgggctgaacggggggttcgtgcacacagcccagcttggagcgaacgacctacaccgaactgagatacctacagcgtgagctatgagaaagcgccacgcttcccgaagggagaaaggcggacaggtatccggtaagcggcagggtcggaacaggagagcgcacgagggagcttccagggggaaacgcctggtatctttatagtcctgtcgggtttcgccacctctgacttgagcgtcgatttttgtgatgctcgtcaggggggcggagcctatggaaaaacgccagcaacgcggcctttttacggttcctggccttttgctggccttttgctcacatggctcgacagatct

SEQ ID NO: 169 - protein, 49 aa, Artificial Sequence
  Transmembrane domain
AVGQDTQEVIVVPHSLPFKVVVISAILALVVLTIISLIILIMLWQKKPR

SEQ ID NO: 170 - protein, 26 aa, Artificial Sequence
  Foldon domain
YIPEAPRDGQAYVRKDGEWVLLSTFL

SEQ ID NO: 171 - protein, 1214 aa, Severe acute respiratory syndrome coronavirus 2
MFVFLVLLPLVSSQCVNLTTRTQLPPAYTNSFTRGVYYPDKVFRSSVLHSTQDLFLPFFSNVTWFHAIHVSGTNGTKRFDNPVLPFNDGVYFASTEKSNIIRGWIFGTTLDSKTQSLLIVNNATNVVIKVCEFQFCNDPFLGVYYHKNNKSWMESEFRVYSSANNCTFEYVSQPFLMDLEGKQGNFKNLREFVFKNIDGYFKIYSKHTPINLVRDLPQGFSALEPLVDLPIGINITRFQTLLALHRSYLTPGDSSSGWTAGAAAYYVGYLQPRTFLLKYNENGTITDAVDCALDPLSETKCTLKSFTVEKGIYQTSNFRVQPTESIVRFPNITNLCPFGEVFNATRFASVYAWNRKRISNCVADYSVLYNSASFSTFKCYGVSPTKLNDLCFTNVYADSFVIRGDEVRQIAPGQTGKIADYNYKLPDDFTGCVIAWNSNNLDSKVGGNYNYLYRLFRKSNLKPFERDISTEIYQAGSTPCNGVEGFNCYFPLQSYGFQPTNGVGYQPYRVVVLSFELLHAPATVCGPKKSTNLVKNKCVNFNFNGLTGTGVLTESNKKFLPFQQFGRDIADTTDAVRDPQTLEILDITPCSFGGVSVITPGTNTSNQVAVLYQDVNCTEVPVAIHADQLTPTWRVYSTGSNVFQTRAGCLIGAEHVNNSYECDIPIGAGICASYQTQTNSPRRARSVASQSIIAYTMSLGAENSVAYSNNSIAIPTNFTISVTTEILPVSMTKTSVDCTMYICGDSTECSNLLLQYGSFCTQLNRALTGIAVEQDKNTQEVFAQVKQIYKTPPIKDFGGFNFSQILPDPSKPSKRSFIEDLLFNKVTLADAGFIKQYGDCLGDIAARDLICAQKFNGLTVLPPLLTDEMIAQYTSALLAGTITSGWTFGAGAALQIPFAMQMAYRFNGIGVTQNVLYENQKLIANQFNSAIGKIQDSLSSTASALGKLQDVVNQNAQALNTLVKQLSSNFGAISSVLNDILSRLDKVEAEVQIDRLITGRLQSLQTYVTQQLIRAAEIRASANLAATKMSECVLGQSKRVDFCGKGYHLMSFPQSAPHGVVFLHVTYVPAQEKNFTTAPAICHDGKAHFPREGVFVSNGTHWFVTQRNFYEPQIITTDNTFVSGNCDVVIGIVNNTVYDPLQPELDSFKEELDKYFKNHTSPDVDLGDISGINASVVNIQKEIDRLNEVAKNLNESLIDLQELGKYEQYIKWPW

SEQ ID NO: 172 - protein, 1213 aa, Severe acute respiratory syndrome coronavirus 2
MFVFLVLLPLVSSQCVNLTTRTQLPPAYTNSFTRGVYYPDKVFRSSVLHSTQDLFLPFFSNVTWFHAIHVSGTNGTKRFDNPVLPFNDGVYFASTEKSNIIRGWIFGTTLDSKTQSLLIVNNATNVVIKVCEFQFCNDPFLGVYYHKNNKSWMESEFRVYSSANNCTFEYVSQPFLMDLEGKQGNFKNLREFVFKNIDGYFKIYSKHTPINLVRDLPQGFSALEPLVDLPIGINITRFQTLLALHRSYLTPGDSSSGWTAGAAAYYVGYLQPRTFLLKYNENGTITDAVDCALDPLSETKCTLKSFTVEKGIYQTSNFRVQPTESIVRFPNITNLCPFGEVFNATRFASVYAWNRKRISNCVADYSVLYNSASFSTFKCYGVSPTKLNDLCFTNVYADSFVIRGDEVRQIAPGQTGKIADYNYKLPDDFTGCVIAWNSNNLDSKVGGNYNYLYRLFRKSNLKPFERDISTEIYQAGSTPCNGVEGFNCYFPLQSYGFQPTNGVGYQPYRVVVLSFELLHAPATVCGPKKSTNLVKNKCVNFNFNGLTGTGVLTESNKKFLPFQQFGRDIADTTDAVRDPQTLEILDITPCSFGGVSVITPGTNTSNQVAVLYQDVNCTEVPVAIHADQLTPTWRVYSTGSNVFQTRAGCLIGAEHVNNSYECDIPIGAGICASYQTQTNSPRRARSVASQSIIAYTMSLGAENSVAYSNNSIAIPTNFTISVTTEILPVSMTKTSVDCTMYICGDSTECSNLLLQYGSFCTQLNRALTGIAVEQDKNTQEVFAQVKQIYKTPPIKDFGGFNFSQILPDPSKPSKRSFIEDLLFNKVTLADAGFIKQYGDCLGDIAARDLICAQKFNGLTVLPPLLTDEMIAQYTSALLAGTITSGWTFGAGAALQIPFAMQMAYRFNGIGVTQNVLYENQKLIANQFNSAIGKIQDSLSSTASALGKLQDVVNQNAQALNTLVKQLSSNFGAISSVLNDILSRLDKVEAEVQIDRLITGRLQSLQTYVTQQLIRAAEIRASANLAATKMSECVLGQSKRVDFCGKGYHLMSFPQSAPHGVVFLHVTYVPAQEKNFTTAPAICHDGKAHFPREGVFVSNGTHWFVTQRNFYEPQIITTDNTFVSGNCDVVIGIVNNTVYDPLQPELDSFKEELDKYFKNHTSPDVDLGDISGINASVVNIQKEIDRLNEVAKNLNESLIDLQELGKYEQYIKWP

SEQ ID NO: 173 - protein, 1208 aa, Severe acute respiratory syndrome coronavirus 2
MFVFLVLLPLVSSQCVNLTTRTQLPPAYTNSFTRGVYYPDKVFRSSVLHSTQDLFLPFFSNVTWFHAIHVSGTNGTKRFDNPVLPFNDGVYFASTEKSNIIRGWIFGTTLDSKTQSLLIVNNATNVVIKVCEFQFCNDPFLGVYYHKNNKSWMESEFRVYSSANNCTFEYVSQPFLMDLEGKQGNFKNLREFVFKNIDGYFKIYSKHTPINLVRDLPQGFSALEPLVDLPIGINITRFQTLLALHRSYLTPGDSSSGWTAGAAAYYVGYLQPRTFLLKYNENGTITDAVDCALDPLSETKCTLKSFTVEKGIYQTSNFRVQPTESIVRFPNITNLCPFGEVFNATRFASVYAWNRKRISNCVADYSVLYNSASFSTFKCYGVSPTKLNDLCFTNVYADSFVIRGDEVRQIAPGQTGKIADYNYKLPDDFTGCVIAWNSNNLDSKVGGNYNYLYRLFRKSNLKPFERDISTEIYQAGSTPCNGVEGFNCYFPLQSYGFQPTNGVGYQPYRVVVLSFELLHAPATVCGPKKSTNLVKNKCVNFNFNGLTGTGVLTESNKKFLPFQQFGRDIADTTDAVRDPQTLEILDITPCSFGGVSVITPGTNTSNQVAVLYQDVNCTEVPVAIHADQLTPTWRVYSTGSNVFQTRAGCLIGAEHVNNSYECDIPIGAGICASYQTQTNSPRRARSVASQSIIAYTMSLGAENSVAYSNNSIAIPTNFTISVTTEILPVSMTKTSVDCTMYICGDSTECSNLLLQYGSFCTQLNRALTGIAVEQDKNTQEVFAQVKQIYKTPPIKDFGGFNFSQILPDPSKPSKRSFIEDLLFNKVTLADAGFIKQYGDCLGDIAARDLICAQKFNGLTVLPPLLTDEMIAQYTSALLAGTITSGWTFGAGAALQIPFAMQMAYRFNGIGVTQNVLYENQKLIANQFNSAIGKIQDSLSSTASALGKLQDVVNQNAQALNTLVKQLSSNFGAISSVLNDILSRLDKVEAEVQIDRLITGRLQSLQTYVTQQLIRAAEIRASANLAATKMSECVLGQSKRVDFCGKGYHLMSFPQSAPHGVVFLHVTYVPAQEKNFTTAPAICHDGKAHFPREGVFVSNGTHWFVTQRNFYEPQIITTDNTFVSGNCDVVIGIVNNTVYDPLQPELDSFKEELDKYFKNHTSPDVDLGDISGINASVVNIQKEIDRLNEVAKNLNESLIDLQELGKYEQ

SEQ ID NO: 174 - protein, 1196 aa, Severe acute respiratory syndrome coronavirus 2
SQCVNLTTRTQLPPAYTNSFTRGVYYPDKVFRSSVLHSTQDLFLPFFSNVTWFHAIHVSGTNGTKRFDNPVLPFNDGVYFASTEKSNIIRGWIFGTTLDSKTQSLLIVNNATNVVIKVCEFQFCNDPFLGVYYHKNNKSWMESEFRVYSSANNCTFEYVSQPFLMDLEGKQGNFKNLREFVFKNIDGYFKIYSKHTPINLVRDLPQGFSALEPLVDLPIGINITRFQTLLALHRSYLTPGDSSSGWTAGAAAYYVGYLQPRTFLLKYNENGTITDAVDCALDPLSETKCTLKSFTVEKGIYQTSNFRVQPTESIVRFPNITNLCPFGEVFNATRFASVYAWNRKRISNCVADYSVLYNSASFSTFKCYGVSPTKLNDLCFTNVYADSFVIRGDEVRQIAPGQTGKIADYNYKLPDDFTGCVIAWNSNNLDSKVGGNYNYLYRLFRKSNLKPFERDISTEIYQAGSTPCNGVEGFNCYFPLQSYGFQPTNGVGYQPYRVVVLSFELLHAPATVCGPKKSTNLVKNKCVNFNFNGLTGTGVLTESNKKFLPFQQFGRDIADTTDAVRDPQTLEILDITPCSFGGVSVITPGTNTSNQVAVLYQDVNCTEVPVAIHADQLTPTWRVYSTGSNVFQTRAGCLIGAEHVNNSYECDIPIGAGICASYQTQTNSPRRARSVASQSIIAYTMSLGAENSVAYSNNSIAIPTNFTISVTTEILPVSMTKTSVDCTMYICGDSTECSNLLLQYGSFCTQLNRALTGIAVEQDKNTQEVFAQVKQIYKTPPIKDFGGFNFSQILPDPSKPSKRSFIEDLLFNKVTLADAGFIKQYGDCLGDIAARDLICAQKFNGLTVLPPLLTDEMIAQYTSALLAGTITSGWTFGAGAALQIPFAMQMAYRFNGIGVTQNVLYENQKLIANQFNSAIGKIQDSLSSTASALGKLQDVVNQNAQALNTLVKQLSSNFGAISSVLNDILSRLDKVEAEVQIDRLITGRLQSLQTYVTQQLIRAAEIRASANLAATKMSECVLGQSKRVDFCGKGYHLMSFPQSAPHGVVFLHVTYVPAQEKNFTTAPAICHDGKAHFPREGVFVSNGTHWFVTQRNFYEPQIITTDNTFVSGNCDVVIGIVNNTVYDPLQPELDSFKEELDKYFKNHTSPDVDLGDISGINASVVNIQKEIDRLNEVAKNLNESLIDLQELGKYEQ

SEQ ID NO: 175 - protein, 137 aa, Severe acute respiratory syndrome coronavirus 2
NLCPFGEVFNATRFASVYAWNRKRISNCVADYSVLYNSASFSTFKCYGVSPTKLNDLCFTNVYADSFVIRGDEVRQIAPGQTGKIADYNYKLPDDFTGCVIAWNSNNLDSKVGGNYNYLYRLFRKSNLKPFERDIST

SEQ ID NO: 176 - protein, 40 aa, Severe acute respiratory syndrome coronavirus 2
SFIEDLLFNKVTLADAGFIKQYGDCLGDIAARDLICAQKF

SEQ ID NO: 177 - protein, 15 aa, Severe acute respiratory syndrome coronavirus 2
PSKRSFIEDLLFNKV
